(19) United States
(12) Patent Application Publication
(10) Pub. No.: US 2006/0269912 A1
(43) Pub. Date: Nov. 30, 2006

(54) Compositions and methods for the detection, diagnosis and therapy of hematological malignancies

(76) Inventors: Alexander Gaiger, Vienna (AT); Paul A. Algate, Issaquah, WA (US); Jane Mannion, Edmonds, WA (US); Marc Retter, Carnation, WA (US)

Correspondence Address: TOWNSEND AND TOWNSEND AND CREW, LLP, TWO EMBARCADERO CENTER, EIGHTH FLOOR, SAN FRANCISCO, CA, 94111-3834, US

(21) Appl. No.: 10/494,740

(22) PCT Filed: Nov. 6, 2002
(86) PCT No.: PCT/US02/35728

§ 371 Date: Aug. 29, 2005

Related U.S. Application Data
(63) Continuation-in-part of application No. 10/040,862, filed on Nov. 6, 2001, now abandoned.
(63) Continuation-in-part of application No. 10/154,884, filed on May 23, 2002, now abandoned.

(51) Int. Cl. C12Q 1/68; G01N 33/574

(52) U.S. Cl. 435/6; 435/7.23

(57) ABSTRACT

Disclosed are methods and compositions for the detection, diagnosis, prognosis, and therapy of hematological malignancies, and in particular, B cell leukemias, lymphomas and multiple myelomas. Disclosed are compositions, methods and kits for eliciting immune and T cell responses to specific malignancy-related antigenic polypeptides and antigenic polypeptide fragments thereof in an animal. Also disclosed are compositions and methods for use in the identification of cells and biological samples containing one or more hematological malignancy-related compositions, and methods for the detection and diagnosis of such diseases and affected cell types. Also disclosed are diagnostic and therapeutic kits, as well as methods for the diagnosis, therapy and/or prevention of a variety of leukemias and lymphomas.

### CROSS-REFERENCES TO RELATED APPLICATIONS

[0001] This application is a continuation in part of the U.S. patent application Ser. No. 10/154,884, filed May 23, 2002, which is a continuation in part of the U.S. patent application Ser. No. 10/040,862, filed Nov. 6, 2001, Attorney Docket No. 014058-013520US, entitled COMPOSITIONS AND METHODS FOR THE DETECTION, DIAGNOSIS AND THERAPY OF HEMATOLOGICAL MALIGNANCIES, the entire specification, claims, sequences and figures of each of which is specifically incorporated herein by reference in its entirety without disclaimer and for all purposes.

### STATEMENT AS TO RIGHTS TO INVENTIONS MADE UNDER FEDERALLY SPONSORED RESEARCH AND DEVELOPMENT

[0002] NOT APPLICABLE

### REFERENCE TO A “SEQUENCE LISTING,” A TABLE, OR A COMPUTER PROGRAM LISTING APPENDIX SUBMITTED ON A COMPACT DISK

[0003] NOT APPLICABLE

### 1. BACKGROUND OF THE INVENTION

[0004] 1.1 Field of the Invention

[0005] The present invention relates generally to the fields of cancer diagnosis and therapy. More particularly, it concerns the surprising discovery of compositions and methods for the detection and immunotherapy of hematological malignancies, and particularly, B cell leukemias, and lymphomas and multiple myelomas. The invention provides new, effective methods, compositions and kits for eliciting immune and T-cell response to antigenic polypeptides, and antigenic peptide fragments isolated therefrom, and methods for the use of such compositions for diagnosis, detection, treatment, monitoring, and/or prevention of various types of human hematological malignancies. In particular, the invention provides polypeptide, peptide, antibody, antigen binding fragment, hybridoma, host cell, vector, and polynucleotide compounds and compositions for use in identification and discrimination between various types of hematological malignancies, and methods for the detection, diagnosis, prognosis, monitoring, and therapy of such conditions in an affected animal.

[0006] 1.2 Description of Related Art

[0007] 1.2.1 Hematological Malignancies

[0008] Hematological malignancies, such as leukemias and lymphomas, are conditions characterized by abnormal growth and maturation of hematopoietic cells. Leukemias are generally neoplastic disorders of hematopoietic stem cells, and include adult and pediatric acute myeloid leukemia (AML), chronic myeloid leukemia (CML), acute lymphocytic leukemia (ALL), chronic lymphocytic leukemia (CLL) and secondary leukemia. Among lymphomas, there are two distinct groups: non-Hodgkin's lymphoma (NHL) and Hodgkin's disease. NHLs are the result of a clonal expansion of B- or T-cells, but the molecular pathogenesis of Hodgkin's disease, including lineage derivation and clonality, remains obscure. Other hematological malignancies include myelodysplastic syndromes (MDS), myeloproliferative syndromes (MPS) and myeloma. Hematological malignancies are generally serious disorders, resulting in a variety of symptoms, including bone marrow failure and organ failure.

[0009] NHLs are the sixth most common cause of cancer related deaths in the United States. Only prostate, breast, lung, colorectal and bladder cancer currently exceed lymphoma in annual incidence. In 1995, more than 45,000 new NHLs were diagnosed, and over 21,000 patients died of these diseases. The average age of lymphoma patients is relatively young (42 years), and the resulting number of years of life lost to these diseases renders NHLs fourth in economic impact among cancers in the United States. In the past 15 years, the American Cancer Society reported a 50% increase in the incidence of NHLs, one of the largest increases for any cancer group. Much of this increase has been attributed to the development of lymphomas in younger men who have acquired AIDS. Lymphomas are also the third most common childhood malignancy and account for approximately 10% of cancers in children. The survival rate (all ages) varies from 73% (low risk) to 26% (high risk).

[0010] 1.3 Deficiencies in the Prior Art

[0011] Treatment for many hematological malignancies, including leukemias and lymphomas, remains difficult, and existing therapies are not universally effective. While treatments involving specific immunotherapy appear to have considerable potential, such treatments have been limited by the small number of known malignancy-associated antigens. Moreover the ability to detect such hematological malignancies in their early stages can be quite difficult depending upon the particular malady. The lack of a sufficient number of specific diagnostic and prognostic markers of the diseases, and identification of cells and tissues that can be affected, has significantly limited the field of oncology.

[0012] Accordingly, there remains a need in the art for improved methods for detecting, screening, diagnosis and treatment of hematological malignancies such as B cell leukemias and lymphomas and multiple myelomas. The present invention fulfills these and other inherent needs in the field, and provides significant advantages in the detection of cells, and cell types that express one or more polypeptides that have been shown to be over-expressed in one or more of such hematological malignancies.

### 2. SUMMARY OF THE INVENTION

[0013] The present invention addresses the foregoing long-felt need and other deficiencies in the art by identifying new and effective strategies for the identification, detection, screening, diagnosis, prognosis, prophylaxis, therapy, and immunomodulation of one or more hematological malignancies, and in particular, B cell leukemias and lymphomas, and multiple myelomas.

[0014] The present invention is based, in part, upon the surprising and unexpected discovery that certain previously unknown or unidentified human polypeptides, peptides, and antigenic fragments derived therefrom have now been identified that are overexpressed in one or more types of hematological malignancies. The genes encoding several of these polypeptides are now identified and obtained in isolated form, and have been characterized using a series of molecular biology methodologies including subtractive library analysis, microarray screening, polynucleotide sequencing, peptide and epitopic identification and characterization, as well as expression profiling, and in vitro whole gene cell priming. A set of these polynucleotides, and the polypeptides, peptides, and antigenic fragments they encode are now identified and implicated in the complex processes of hematological malignancy disease onset, progression, and/or outcome, and in particular, diseases such as leukemias and lymphomas.

[0015] The inventors have further demonstrated that a number of these polynucleotides, and their encoded polypeptides, as well as antibodies, antigen presenting cells, T cells, and the antigen binding fragments derived from such antibodies are useful in the development of particularly advantageous compositions and methods for the detection, diagnosis, prognosis, prophylaxis and/or therapy of one or more of these diseases, and particularly those conditions that are characterized by (a) increased, altered, elevated, or sustained expression of one or more polynucleotides that comprise at least a first sequence region that comprises a nucleic acid sequence as disclosed in any one of SEQ ID NOs:11,000-11,038 and 11,291-11,292 or (b) an increased, altered, elevated, or sustained biological activity of one or more polypeptides that comprise at least a first sequence region that comprises an amino acid sequence as encoded by any one of the above polynucleotides or disclosed in any one of SEQ ID NOs:11,039-11,058 and 11293.

[0016] The present invention also provides methods and uses for one or more of the disclosed peptide, polypeptide, antibody, antigen binding fragment, and polynucleotide compositions of the present invention in generating an immune response or in generating a T-cell response in an animal, and in particular in a mammal such as a human. The invention also provides methods and uses for one or more of these compositions in the identification, detection, and quantitation of hematological malignancy compositions in clinical samples, isolated cells, whole tissues, and even affected individuals. The compositions and methods disclosed herein also may be used in the preparation of one or more diagnostic reagents, assays, medicaments, or therapeutics, for diagnosis and/or therapy of such diseases.

[0017] In a first important embodiment, there is provided a composition comprising at least a first isolated peptide or polypeptide that comprises an amino acid sequence that is at least about 80%, about 81%, about 82%, about 83%, about 84%, about 85%, about 86%, about 87%, about 88%, about 89%, about 90%, about 91%, about 92%, about 93%, about 94%, about 95%, about 96%, about 97%, about 98%, or about 99% identical to the amino acid sequence encoded by any one of the above polynucleotides or disclosed in any one of SEQ ID NOs:11,039-11,058 and 11,293. Exemplary preferred sequences are those that comprise at least a first coding region that comprises an amino acid sequence that is at least about 85%, about 86%, about 87%, about 88%, about 89%, about 90%, about 91%, about 92%, about 93%, or about 94% identical to the amino acid sequence as encoded by any one of the above polynucleotides or disclosed in any one of SEQ ID NOs:11,039-11,058 and 11,293, with those sequences that comprise at least a first coding region that comprises an amino acid sequence that is at least about 95%, about 96%, about 97%, about 98%, or about 99% identical to the amino acid sequence as encoded by any one of the above polynucleotides or disclosed in any one of SEQ ID NOs:11,039-11,058, and 11,293 being examples of particularly preferred sequences in the practice of the present invention. Likewise, peptide and polypeptide compounds and compositions are also provided that comprise, consist essentially of, or consist of the amino acid sequence as encoded by any one of the above polynucleotides or disclosed in any one of SEQ ID NOs:11,039-11,058, and 11,293.

[0018] In a similar fashion, there are also embodiments disclosed herein that provide compositions and methods for the detection, diagnosis, prognosis, prophylaxis, treatment, and therapy of B cell leukemia, lymphoma and multiple myeloma. Exemplary preferred peptide and polypeptide compounds and compositions relating to this aspect of the invention include, but are not limited to, those peptide and polypeptide compounds or compositions that comprise at least a first isolated peptide or polypeptide that comprises an amino acid sequence that is at least about 80%, about 81%, about 82%, about 83%, about 84%, about 85%, about 86%, about 87%, about 88%, about 89%, about 90%, about 91%, about 92%, about 93%, about 94%, about 95%, about 96%, about 97%, about 98%, or about 99% identical to the amino acid sequence as encoded by any one of the above polynucleotides or disclosed in any one of SEQ ID NOs:11,039-11,058, and 11,293 and those that comprise at least a first coding region that comprises an amino acid sequence that is at least about 85%, about 86%, about 87%, about 88%, about 89%, about 90%, about 91%, about 92%, about 93%, or about 94% identical to the amino acid sequence as encoded by any one of the above polynucleotides or disclosed in any one of SEQ ID NOs:11,039-11,058 and 11,293, and even those sequences that comprise at least a first coding region that comprises an amino acid sequence that is at least about 95%, about 96%, about 97%, about 98%, or about 99% identical to the amino acid sequence as encoded by any one of the above polynucleotides or disclosed in any one of SEQ ID NOs:11,039-11,058, and 11,293.

[0019] Exemplary peptides of the present invention may be of any suitable length, depending upon the particular application thereof, and encompass those peptides that are about 9, about 10, about 15, about 20, about 25, about 30, about 35, about 40, about 45, about 50, about 55, about 60, about 65, about 70, about 75, about 80, about 85, about 90, about 95, or about 100 or so amino acids in length. Of course, the peptides of the invention may also encompass any intermediate lengths or integers within the stated ranges.

[0020] Exemplary polypeptides and proteins of the present invention may be of any suitable length, depending upon the particular application thereof, and encompass those polypeptides and proteins that are about 100, about 150, about 200, about 250, about 300, about 350, or about 400 or so amino acids in length. Of course, the polypeptides and proteins of the invention may also encompass any intermediate lengths or integers within the stated ranges.

[0021] The peptides, polypeptides, proteins, antibodies, and antigen binding fragments of the present invention will preferably comprise a sequence of at least about 5, 10, 15, 20, 25, 30, 35, 40, 45, 50, 55, 60, 65, 70, 75, 80, 85, 90, 95 or 100 contiguous amino acids from any one of the peptides as encoded by any one of the above polynucleotides or disclosed in any one of SEQ ID NOs:11,039-11,058 and 11,293.

[0022] Furthermore, the polypeptides, proteins, antibodies, and antigen binding fragments of the present invention will even more preferably comprise at least a first isolated coding region that comprises a sequence of at least about 100, 110, 120, 130, 140, 150, 160, 170, 180, 190, or 200 contiguous amino acids from any one of the peptides as encoded by any one of the above polynucleotides or disclosed in any one of SEQ ID NOs:11,039-11,058, and 11,293.

[0023] Likewise, the polypeptides, proteins, antibodies, and antigen binding fragments of the present invention may comprise at least a first isolated coding region that comprises a substantially longer sequence, such as for example, one of at least about 200, 220, 240, 260, 280, or 300 or more contiguous amino acids from any one of the peptides as encoded by any one of the above polynucleotides or disclosed in any one of SEQ ID NOs:11,039-11,058, and 11,293.

[0024] In illustrative embodiments, and particularly in those embodiments concerning methods and compositions relating to B cell leukemias, lymphomas and multiple myelomas, the polypeptides of the invention comprise an amino acid sequence that (a) comprises, (b) consists essentially of, or (c) consists of, the amino acid sequence encoded by any one of the above polynucleotides or disclosed in any one of SEQ ID NOs:11,039-11,058, and 11,293.

[0025] The polypeptides and proteins of the invention preferably comprise an amino acid sequence that is encoded by at least a first nucleic acid segment that comprises an at least 21, 22, 23, 24, 25, 26, 27, 28, 29, or 30 contiguous nucleotide sequence of any one of SEQ ID NOs:11,000-11,038 and 11,291-11,292.

[0026] The polypeptides and proteins of the invention may also preferably comprise an amino acid sequence encoded by at least a first nucleic acid segment that comprises an at least about 31, 32, 33, 34, 35, 36, 37, 38, 39, or 40 contiguous nucleotide sequence of any one of SEQ ID NOs:11,000-11,038, and 11,292-11,292. The polypeptides and proteins of the invention may also preferably comprise one or more coding regions that comprise an amino acid sequence encoded by at least a first nucleic acid segment that comprises an at least about 41, 42, 43, 44, 45, 46, 47, 48, 49, or 50 contiguous nucleotide sequence of any one of SEQ ID NOs:11,000-11,038, and 11,291-11,292. The polypeptides and proteins of the invention may also preferably comprise one or more coding regions that comprise an amino acid sequence encoded by at least a first nucleic acid segment that comprises an at least about 51, 52, 53, 54, 55, 56, 57, 58, 59, or 60 contiguous nucleotide sequence of any one of SEQ ID NOs:11,000-11,038, ans 11,291-11,292. The polypeptides and proteins of the invention may also preferably comprise one or more coding regions that comprise an amino acid sequence encoded by at least a first nucleic acid segment that comprises an at least about 70, 80, 90, 100, 110, 120, 130, 140 or 150 contiguous nucleotide sequence of any one of SEQ ID NOs:11,000-11,038, and 11,291-11,292. The polypeptides and proteins of the invention may also preferably comprise one or more coding regions that comprise an amino acid sequence encoded by at least a first nucleic acid segment that comprises an at least about 175, 200, 225, 250, 275, 300, 325, 350, 375, or 400 contiguous nucleotide sequence of any one of SEQ ID NOs:11,000-11,038, and 11,291-11,292. The polypeptides and proteins of the invention may also preferably comprise one or more coding regions that comprise an amino acid sequence encoded by at least a first nucleic acid segment that comprises an at least about 500, 600, 700, 800, 900, 1000, 1100, 1200, 1300, 1400, or 1500 contiguous nucleotide sequence of anyone of SEQ ID NOs:11,000-11,038, and 11,291-11,292.

[0027] In a second important embodiment, there is provided a composition comprising at least a first isolated polynucleotide that comprises a nucleic acid sequence that is at least about 80%, about 81%, about 82%, about 83%, about 84%, about 85%, about 86%, about 87%, about 88%, about 89%, about 90%, about 91%, about 92%, about 93%, about 94%, about 95%, about 96%, about 97%, about 98%, or about 99% identical to the nucleic acid sequence of any one of SEQ ID NOs:11,000-11,038, and 11,291-11,292. Exemplary preferred sequences are those that comprise a nucleic acid sequence that is at least about 85%, about 86%, about 87%, about 88%, about 89%, about 90%, about 91%, about 92%, about 93%, or about 94% identical to the nucleic acid sequence of any one of SEQ ID NOs:11,000-11,038 and 11,291-11,292, with those sequences that comprise at least a nucleic acid sequence that is at least about 95%, about 96%, about 97%, about 98%, or about 99% identical to the nucleic acid sequence of any one of SEQ ID NOs:11,000-11,038, and 11,291-11,292 being examples of particularly preferred sequences in the practice of the present invention.

[0028] In embodiments that relate particularly to compositions and methods for the detection, diagnosis, prognosis, prophylaxis, treatment, and therapy of B cell leukemias, lymphomas, and multiple myelomas exemplary preferred polynucleotide compositions include those compositions that comprise at least a first isolated nucleic acid segment that comprises a sequence that is at least about 80%, about 81%, about 82%, about 83%, about 84%, about 85%, about 86%, about 87%, about 88%, about 89%, about 90%, about 91%, about 92%, about 93%, about 94%, about 95%, about 96%, about 97%, about 98%, or about 99% identical to the nucleic acid sequence of any one of SEQ ID NOs:11,000-11,038, and 11,291-11,292. Such polynucleotides will preferably comprise one or more isolated coding region, each of which may (a) comprise, (b) consist essentially of, or (c) consist of, the nucleic acid sequence of SEQ ID NOs:11,000-11,038, and 11,291-11,292.

[0029] Exemplary polynucleotides of the present invention may be of any suitable length, depending upon the particular application thereof, and encompass those polynucleotides that (a) are at least about, or (b) comprise at least a first isolated nucleic acid segment that is at least about 27, 30, 40, 50, 60, 70, 80, 90, 100, 110, 120, 120, 140, 150, 160, 170, 180, 190, 200, 210, 220, 230, 240, 250, 260, 270, 280, 290, 300, 320, 340, 360, 380, 400, 420, 440, 460, 480, 500, 520, 540, 560, 580, 600, 625, 650, 675, 700, 750, 800, 850, 900, 950, or 1000 or so nucleic acids in length, as well as longer polynucleotides that (a) are at least about, or (b) comprise at least a first isolated nucleic acid segment that is at least about 1000, 1025, 1050, 1075, 1100, 150, 1200, 1250, 1300, 1350, 1400, 1450, 1500, 1550, 1600, 1650, 1700, 1750, 1800, 1850, 1900, 1950, 2000, 2100, 2200, 2300, 2400, 2500, 2600, 2700, 2800, 2900, or 3000 or so nucleic acids in length, as well as substantially larger polynucleotides. Of course, the polynucleotides and nucleic acid segments of the invention may also encompass any intermediate lengths or integers within the stated ranges.

[0030] The compositions of the present invention may comprise a single polypeptide or polynucleotide, or alternatively, may comprise two or more such hematological malignancy compounds, such as for example, two or more polypeptides, two or more polynucleotides, or even combinations of one or more peptides or polypeptides, along with one or more polynucleotides. When two or more polypeptides are contemplated for particular applications, the second and/or third and/or fourth, etc. isolated peptides and/or polypeptides will preferably comprise an amino acid sequence that is at least about 91%, 93%, 95%, 97%, or 99% identical to the amino acid sequence encoded by any one of the above polynucleotides or disclosed in any one of SEQ ID NOs:11,039-11,058, and 11,293. Alternatively, the polynucleotides of the invention may comprise one or more coding regions that encode a first fusion protein or peptide, such as an adjuvant-coding region fused in correct reading frame to one or more of the disclosed hematological malignancy peptides or polypeptides. Alternatively, the fusion protein may comprise a hematological malignancy polypeptide or peptide fused, in correct reading frame, to a detectable protein or peptide, or to an immunostimulant protein or peptide, or other such construct. Fusion proteins such as these are particularly useful in those embodiments relating to diagnosis, detection, and therapy of one or more of the hematological malignancies as discussed herein.

[0031] The invention also provides a composition comprising at least a first hybridoma cell line that produces a monoclonal antibody having immunospecificity for one or more of the peptides or polypeptides as disclosed herein, or at least a first monoclonal antibody, or an antigen-binding fragment thereof, that has immunospecificity for such a peptide or polypeptide. The antigen binding fragments may comprise a light chain variable region, a heavy-chain variable region, a Fab fragment, a F(ab)₂ fragment, an Fv fragment, an scFv fragment, or an antigen-binding fragment of such an antibody.

[0032] The invention also provides a composition comprising at least a first isolated antigen-presenting cell that expresses a peptide or polypeptide as disclosed herein, or a plurality of isolated T cells that specifically react with such a peptide or polypeptide. Such pluralities of isolated T cells may be stimulated or expanded by contacting the T cells with one or more peptides or polypeptides as described herein. The T cells may be cloned prior to expansion, and may be obtained from bone marrow, a bone marrow fraction, peripheral blood, or a peripheral blood fraction from a healthy mammal, or from a mammal that is afflicted with at least a first hematological malignancy such as leukemia or lymphoma.

[0033] As described above, the isolated polypeptides of the invention may be on the order of from 9 to about 1000 amino acids in length, or alternatively, may be on the order of from 50 to about 900 amino acids in length, from 75 to about 800 amino acids in length, from 100 to about 700 amino acids in length, or from 125 to about 600 amino acids in length, or any other such suitable range.

[0034] The isolated nucleic acid segments that encode such isolated polypeptides may be on the order of from 27 to about 10,000 nucleotides in length, from 150 to about 8000 nucleotides in length, from 250 to about 6000 nucleotides in length, from 350 to about 4000 nucleotides in length, or from 450 to about 2000 nucleotides in length, or any other such suitable range.

[0035] The nucleic acid segment may be operably positioned under the control of at least a first heterologous, recombinant promoter, such as a tissue-specific, cell-specific, inducible, or otherwise regulated promoter. Such promoters may be further controlled or regulated by the presence of one or more additional enhancers or regulatory regions depending upon the particular cell type in which expression of the polynucleotide is desired. The polynucleotides and nucleic acid segments of the invention may also be comprised within a vector, such as a plasmid, or viral vector. The polypeptides and polynucleotides of the invention may also be comprised within a host cell, such as a recombinant host cell or a human host cell such as a blood or bone marrow cell.

[0036] The polynucleotides of the invention may comprise at least a first isolated nucleic acid segment operably attached, in frame, to at least a second isolated nucleic acid segment, such that the polynucleotide encodes a fusion protein in which the first peptide or polypeptide is linked to the second peptide or polypeptide.

[0037] The polypeptides of the present invention may comprise a contiguous amino acid of any suitable length, such as for example, those of about 2000, about 1900, about 1850, about 1800, about 1750, about 1700, about 1650, about 1600, about 1550, about 1500, about 1450, about 1400, about 1350, about 1300, about 1250, about 1200, about 1150, about 1100 amino acids, or about 1000 or so amino acids in length. Likewise, the polypeptides and peptides of the present invention may comprise slightly shorter contiguous amino acid coding regions, such as for example, those of about 950, about 900, about 850, about 800, about 750, about 700, about 650, about 600, about 550, about 500, about 450, about 400, about 350, about 300, about 250, about 200, about 150, or even about 100 amino acids or so in length.

[0038] In similar fashion, the polypeptides and peptides of the present invention may comprise even smaller contiguous amino acid coding regions, such as for example, those of about 95, about 90, about 85, about 80, about 75, about 70, about 65, about 60, about 55, about 50, about 45, about 40, about 35, about 30, about 25, about 20, about 15, or even about 9 amino acids or so in length.

[0039] In all such embodiments, those peptides and polypeptides having intermediate lengths including all integers within the preferred ranges (e.g., those peptides and polypeptides that comprise at least a first coding region of at least about 94, about 93, about 92, about 91, about 89, about 88, about 87, about 86, about 84, about 83, about 82, about 81, about 79, about 78, about 77, about 76, about 74, about 73, about 72, about 71, about 69, about 68, about 67, about 66 or so amino acids in length, etc.) are all contemplated to fall within the scope of the present invention.

[0040] In particular embodiments, the peptides and polypeptides of the present invention may comprise a sequence of at least about 9, or about 10, or about 11, or about 12, or about 13, or about 14, or about 15, or about 16, or about 17, or about 18, or about 19, or about 20, or about 21, or about 22, or about 23, or about 24, or about 25, or about 26, or about 27, or about 28, or about 29, or about 30, or about 31, or about 32, or about 33, or about 34, or about 35, or about 36, or about 37, or about 38, or about 39, or about 40, or about 41, or about 42, or about 43, or about 44, or about 45, or about 46, or about 47, or about 48, or about 49, or about 50 contiguous amino acids as disclosed in any one or more of the peptides encoded by any one of the above polynucleotides or disclosed in any one of SEQ ID NOs:11,039-11,058, and 11,293 herein.

[0041] In other embodiments, the peptides and polypeptides of the present invention may comprise a sequence of at least about 51, or about 52, or about 53, or about 54, or about 55, or about 56, or about 57, or about 58, or about 59, or about 60, or about 61, or about 62, or about 63, or about 64, or about 65, or about 66, or about 67, or about 68, or about 69, or about 70, or about 71, or about 72, or about 73, or about 74, or about 75, or about 76, or about 77, or about 78, or about 79, or about 80, or about 81, or about 82, or about 83, or about 84, or about 85, or about 86, or about 87, or about 88, or about 89, or about 90, about 91, or about 92, or about 93, or about 94, or about 95, or about 96, or about 97, or about 98, or about 99, or 100 contiguous amino acids as disclosed in any one or more of the peptides encoded by any one of the above polynucleotides or disclosed in any one of SEQ ID NOs:11,039-11,058, and 11,293 herein.

[0042] In still other embodiments, the preferred peptides and polypeptides of the present invention comprise a sequence of at least about 100, 125, 150, 175, 200, 225, 250, 275, 300, 325, 350, 375, or 400 or more contiguous amino acids as disclosed in any one or more of the peptides encoded by any one of the above polynucleotides or disclosed in any one of SEQ ID NOs:11,039-11,058, and 11,293 herein.

[0043] The polypeptides of the invention typically will comprise at least a first contiguous amino acid sequence according to any one of the peptides encoded by any one of the above polynucleotides or disclosed in any one of SEQ ID NOs:11,039-11,058, and 11,293, but may also, optionally comprise at least a second, at least a third, or even at least a fourth or greater contiguous amino acid sequence according to any one of the peptides encoded by any one of the above polynucleotides or disclosed in any one of SEQ ID NOs:11,039-11,058, and 11,293. A single polypeptide may contain only a single coding region, or alternatively, a single polypeptide may comprise a plurality of identical or distinctly different contiguous amino acid sequences in accordance with any one of the peptides encoded by any one of the above polynucleotides or disclosed in any one of SEQ ID NOs:11,039-11,058, and 11,293. In fact, the polypeptide may comprise a plurality of the same contiguous amino acid sequences, or they may comprise one or more different contiguous amino acid sequences of any of the peptides encoded by any one of the above polynucleotides or disclosed in any one of SEQ ID NOs:11,039-11,058, and 11,293. For example, a single polypeptide can comprise a single contiguous amino acid sequence from one or more of the peptides encoded by any one of the above polynucleotides or disclosed in any one of SEQ ID NOs:11,039-11,058, and 11,293, or alternatively, may comprise two or more distinctly different contiguous amino acid sequences from one or more of the peptides encoded by any one of the above polynucleotides or disclosed in any one of SEQ ID NOs:11,039-11,058, and 11,293. In fact, the polypeptide may comprise 2, 3, 4, or even 5 distinct contiguous amino sequences of any one of the peptides encoded by any one of the above polynucleotides or disclosed in any one of SEQ ID NOs: 11,039-11,058 and 11,293. Alternatively, a single polypeptide may comprise 2, 3, 4, or even 5 distinct coding regions. For example, a polypeptide may comprise at least a first coding region that comprises a first contiguous amino acid sequence of any one of the peptides encoded by any one of the above polynucleotides or disclosed in any one of SEQ ID NOs:11,039-11,058, and 11,293, and at least a second coding region that comprises a second contiguous amino acid sequence of any one of the peptides encoded by any one of the above polynucleotides or disclosed in any one of SEQ ID NOs:11,039-11,058, and 11,293. In contrast, a polypeptide may comprise at least a first coding region that comprises a first contiguous amino acid sequence of any one of the peptides encoded by any one of the above polynucleotides or disclosed in any one of SEQ ID NOs:11,039-11,058, and 11,293, and at least a second coding region that comprises a second distinctly different peptide or polypeptide, such as for example, an adjuvant or an immunostimulant peptide or polypeptide.

[0044] In such cases, the two coding regions may be separate on the same polypeptide, or the two coding regions may be operatively attached, each in the correct reading frame, such that a fusion polypeptide is produced, in which the first amino acid sequence of the first coding region is linked to the second amino acid sequence of the second coding region.

[0045] Throughout this disclosure, a phrase such as “a sequence as disclosed in SEQ ID NO:11,000 to SEQ ID NO:11,004” is intended to encompass any and all contiguous sequences disclosed by any one of these sequence identifiers. That is to say, “a sequence as disclosed in any of SEQ ID NO:11,000 through SEQ ID NO:11,004” means any sequence that is disclosed in any one of SEQ BD NO:11,000, SEQ ID NO:11,001, SEQ ID NO:11,002, SEQ ID NO:11,003, or SEQ ID NO:11,004. Likewise, “a sequence as disclosed in any of SEQ ID NOs:25 to 37” means any sequence that is disclosed in any one of SEQ ID NO:25, SEQ ID NO:26, SEQ ID NO:27, SEQ ID NO:28, SEQ ID NO:29, SEQ ID NO:30, SEQ ID NO:31, SEQ ID NO:32, SEQ ID NO:33, SEQ ID NO:34, SEQ ID NO:35, SEQ ID NO:36, or SEQ ID NO:37, and so forth.

[0046] Likewise, a phrase such as “at least a first sequence from any one of SEQ ID NO:55 to SEQ ID NO:62” is intended to refer to a first sequence that is disclosed in any one of SEQ ID NO:55, SEQ ID NO:56, SEQ ID NO:57, SEQ ID NO:58, SEQ ID NO:59, SEQ ID NO:60, SEQ ID NO:61, or SEQ ID NO:62.

[0047] It will also be understood that the kits, and compositions of the present invention comprise in an overall and general sense at least one or more particular polynucleotides, polypeptides, and peptides that comprise one or more contiguous sequence regions from one or more of the nucleic acid sequences disclosed herein in SEQ ID NOs:11,000-11,038, and 11,291-11,292 or from one or more of the amino acid sequences encoded by any one of the above polynucleotides or disclosed in any one of SEQ ID NOs:11,039-11,058, and 11,293, and that such peptide, polypeptide and polynucleotide compositions may be used in one or more of the particular methods and uses disclosed herein for the diagnosis, detection, prophylaxis, and therapy of one or more hematological cancers, and in particular, lymphomas of a variety of specific types. It will also be understood to the skilled artisan having benefit of the teachings of the present Specification, that the peptide and polypeptide compositions may be used to generate a T cell or an immune response in an animal, and that such compositions may also be administered to an animal from which immunospecific antibodies and antigen binding fragments may be isolated or identified that specifically bind to such peptides or polypeptides. Such an artisan will also recognize that the polynucleotides identified by the present disclosure may be used to produce such peptides, polypeptides, antibodies, and antigen binding fragments, by recombinant protein production methodologies that are also within the capability of the skilled artisan having benefit of the specific amino acid and nucleic acid sequences provided herein.

[0048] Likewise, it will be understood by a skilled artisan in the field, that one or more of the disclosed compositions may used in one or more diagnostic or detection methodologies to identify certain antibodies, peptides, polynucleotides, or polypeptides in a biological sample, in a host cell, or even within the body or tissues of an animal. It will be understood by a skilled artisan in the field, that one or more of the disclosed nucleic acid or amino acid compositions may used in the preparation or manufacture of one or more medicaments for use in the diagnosis, detection, prognosis, prophylaxis, or therapy of one or more hematological malignancies in an animal, and particularly those malignant conditions disclosed and claimed herein.

[0049] It will also be readily apparent to those of skill in the art, that the methods, kits, and uses, of the present invention preferably employ one or more of the compounds and/or compositions disclosed herein that comprise one or more contiguous nucleotide sequences as may be presented in SEQ ID NOs:11,000-11,038, and 11,291-11,292, of the attached sequence listing.

[0050] Likewise, it will also be readily apparent to those of skill in the art, that the methods, kits, and uses, of the present invention may also employ one or more of the compounds and compositions disclosed herein that comprise one or more contiguous amino acid sequences of any of the peptides encoded by any one of the above polynucleotides or presented in any one of SEQ ID NOs:11,039-11,058 of the attached sequence listing.

### 3. BRIEF DESCRIPTION OF THE DRAWINGS AND THE APPENDICES

[0051] The invention may be understood by reference to the following description taken in conjunction with the accompanying drawings, in which like reference numerals identify like elements, and in which:

[0052] FIG. 1 illustrates a schematic outline of the microarray chip technology approach used to identify the cDNA targets of the present invention as described Section 5.1.

[0053] FIG. 2 illustrates a schematic outline of the general protocol for in vitro whole gene CD8⁺ T cell priming procedure used to generate antigen-specific lines and to identify clones of interest.

[0054] FIG. 3 illustrates a schematic outline of the general protocol for in vitro whole gene CD4⁺ T cell priming procedure used to generate antigen-specific lines and to identify clones of interest.

[0055] FIG. 4 illustrates the panel of probes used to identify cDNAs that are overexpressed in lymphoma cells.

[0056] FIG. 5 illustrates the results of analyzing SEQ ID NO:9611 with the program TSITES.

[0057] FIG. 6 illustrates the presence of Ly1448P-specific serum antibodies in lymphoma patients.

[0058] FIG. 7 diagrammatically illustrates the 18 LY1448P exons present on chromosome 1 and the location of these exons in several splice variants.

[0059] FIG. 8 depicts the Ly1448P splice forms and the exons used in each.

[0060] FIG. 9 diagrammatically depicts the structure of each of the Ly1448P splice forms.

### 4. DESCRIPTION OF ILLUSTRATIVE EMBODIMENTS

[0061] In order that the invention herein described may be more fully understood, the following description of various illustrative embodiments is set forth.

[0062] The present invention is generally directed to compositions and methods for the immunotherapy and diagnosis of Hematological malignancies, such as B cell leukemias and lymphomas and multiple myelomas.

[0063] 4.1 Methods of Nucleic Acid Delivery and DNA Transfection

[0064] In certain embodiments, it is contemplated that one or more RNA or DNA and/or substituted polynucleotide compositions disclosed herein will be used to transfect an appropriate host cell. Technology for introduction of RNAs and DNAs, and vectors comprising them into suitable host cells is well known to those of skill in the art. In particular, such polynucleotides may be used to genetically transform one or more host cells, when therapeutic administration of one or more active peptides, compounds or vaccines is achieved through the expression of one or more polynucleotide constructs that encode one or more therapeutic compounds of interest.

[0065] A variety of means for introducing polynucleotides and/or polypeptides into suitable target cells is known to those of skill in the art. For example, when polynucleotides are contemplated for delivery to cells, several non-viral methods for the transfer of expression constructs into cultured mammalian cells are available to the skilled artisan for his use. These include, for example, calcium phosphate precipitation (Graham and Van Der Eb, 1973; Chen and Okayama, 1987; Rippe et al., 1990); DEAE-dextran precipitation (Gopal, 1985); electroporation (Wong and Neumann, 1982; Fromm et al., 1985; Tur-Kaspa et al, 1986; Potter et al., 1984; Suzuki et al., 1998; Vanbever et al., 1998), direct microinjection (Capecchi, 1980; Harland and Weintraub, 1985), DNA-loaded liposomes (Nicolau and Sene, 1982; Fraley et al., 1979; Takakura, 1998) and lipofectamine-DNA complexes, cell sonication (Fechheimer et al., 1987), gene bombardment using high velocity microprojectiles (Yang et al., 1990; Klein et al., 1992), and receptor-mediated transfection (Curiel et al., 1991; Wagner et al., 1992; Wu and Wu, 1987; Wu and Wu, 1988). Some of these techniques may be successfully adapted for in vivo or ex vivo use.

[0066] A bacterial cell, a yeast cell, or an animal cell transformed with one or more of the disclosed expression vectors represent an important aspect of the present invention. Such transformed host cells are often desirable for use in the expression of the various DNA gene constructs disclosed herein. In some aspects of the invention, it is often desirable to modulate, regulate, or otherwise control the expression of the gene segments disclosed herein. Such methods are routine to those of skill in the molecular genetic arts. Typically, when increased or over-expression of a particular gene is desired, various manipulations may be employed for enhancing the expression of the messenger RNA, particularly by using an active promoter, and in particular, a tissue-specific promoter such as those disclosed herein, as well as by employing sequences, which enhance the stability of the messenger RNA in the particular transformed host cell.

[0067] Typically, the initiation and translational termination region will involve stop codon(s), a terminator region, and optionally, a polyadenylation signal. In the direction of transcription, namely in the 5′ to 3′ direction of the coding or sense sequence, the construct will involve the transcriptional regulatory region, if any, and the promoter, where the regulatory region may be either 5′ or 3′ of the promoter, the ribosomal binding site, the initiation codon, the structural gene having an open reading frame in phase with the initiation codon, the stop codon(s), the polyadenylation signal sequence, if any, and the terminator region. This sequence as a double strand may be used by itself for transformation of a microorganism or eukaryotic host, but will usually be included with a DNA sequence involving a marker, where the second DNA sequence may be joined to the expression construct during introduction of the DNA into the host.

[0068] Where no functional replication system is present, the construct will also preferably include a sequence of at least about 30 or about 40 or about 50 base pairs (bp) or so, preferably at least about 60, about 70, about 80, or about 90 to about 100 or so bp, and usually not more than about 500 to about 1000 or so bp of a sequence homologous with a sequence in the host. In this way, the probability of legitimate recombination is enhanced, so that the gene will be integrated into the host and stably maintained by the host. Desirably, the regulatory regions of the expression construct will be in close proximity to (and also operably positioned relative to) the selected therapeutic gene providing for complementation as well as the gene providing for the competitive advantage. Therefore, in the event that the therapeutic gene is lost, the resulting organism will be likely to also lose the gene providing for the competitive advantage, so that it will be unable to compete in the environment with the gene retaining the intact construct.

[0069] The selected therapeutic gene can be introduced between the transcriptional and translational initiation region and the transcriptional and translational termination region, so as to be under the regulatory control of the initiation region. This construct may be included in a plasmid, which will include at least one replication system, but may include more than one, where one replication system is employed for cloning during the development of the plasmid and the second replication system is necessary for functioning in the ultimate host, in this case, a mammalian host cell. In addition, one or more markers may be present, which have been described previously. Where integration is desired, the plasmid will desirably include a sequence homologous with the host genome.

[0070] Genes or other nucleic acid segments, as disclosed herein, can be inserted into host cells using a variety of techniques that are well known in the art. Five general methods for delivering a nucleic segment into cells have been described: (1) chemical methods (Graham and Van Der Eb, 1973); (2) physical methods such as microinjection (Capecchi, 1980), electroporation (U.S. Pat. No. 5,472,869; Wong and Neumann, 1982; Fromm et al., 1985), microprojectiles bombardment (U.S. Pat. No. 5,874,265, specifically incorporated herein by reference in its entirety), “gene gun” (Yang et al., 1990); (3) viral vectors (Eglitis and Anderson, 1988); (4) receptor-mediated mechanisms (Curiel et al., 1991; Wagner et al., 1992); and (5) bacterial-mediated transformation

[0071] 4.2 Hematological Malignancy Related-Specific Antibodies and Antigen-Binding Fragments Thereof

[0072] The present invention further provides antibodies and antigen-binding fragments thereof, that specifically bind to (or are immunospecific for) at least a first peptide or peptide variant as disclosed herein. As used herein, an antibody or an antigen-binding fragment is said to “specifically bind” to a peptide if it reacts at a detectable level (within, for example, an ELISA) with the peptide, and does not react detectably with unrelated peptides or proteins under similar conditions. As used herein, “binding” refers to a non-covalent association between two separate molecules such that a “complex” is formed. The ability to bind may be evaluated by, for example, determining a binding constant for the formation of the complex. The binding constant is the value obtained when the concentration of the complex is divided by the product of the component concentrations. In the context of the present invention, in general, two compounds are said to “bind” when the binding constant for complex formation exceeds about 10³ L/mol. The binding constant maybe determined using methods well known in the art.

[0073] Any agent that satisfies the above requirements may be a binding agent. In illustrative embodiments, a binding agent is an antibody or an antigen-binding fragment thereof. Such antibodies may be prepared by any of a variety of techniques known to those of ordinary skill in the art (Harlow and Lane, 1988). In general, antibodies can be produced by cell culture techniques, including the generation of monoclonal antibodies as described herein, or via transfection of antibody genes into suitable bacterial or mammalian cell hosts, in order to allow for the production of recombinant antibodies. In one technique, an immunogen comprising the peptide is initially injected into any of a wide variety of mammals (e.g., mice, rats, rabbits, sheep or goats). In this step, the peptides of this invention may serve as the immunogen without modification. Alternatively, particularly for relatively short peptides, a superior immune response may be elicited if the peptide is joined to a carrier protein, such as bovine serum albumin or keyhole limpet hemocyanin. The immunogen is injected into the animal host, preferably according to a predetermined schedule incorporating one or more booster immunizations, and the animals are bled periodically. Polyclonal antibodies specific for the peptide may then be purified from such antisera by, for example, affinity chromatography using the peptide coupled to a suitable solid support.

[0074] Monoclonal antibodies specific for the antigenic peptide of interest may be prepared, for example, using the technique of Kohler and Milstein (1976) and improvements thereto. Briefly, these methods involve the preparation of immortal cell lines capable of producing antibodies having the desired specificity (i.e., reactivity with the peptide of interest). Such cell lines may be produced, for example, from spleen cells obtained from an animal immunized as described above. The spleen cells are then immortalized by, for example, fusion with a myeloma cell fusion partner, preferably one that is syngeneic with the immunized animal. A variety of fusion techniques may be employed. For example, the spleen cells and myeloma cells may be combined with a nonionic detergent for a few minutes and then plated at low density on a selective medium that supports the growth of hybrid cells, but not myeloma cells. A preferred selection technique uses HAT (hypoxanthine, aminopterin, thymidine) selection. After a sufficient time, usually about 1 to 2 weeks, colonies of hybrids are observed. Single colonies are selected and their culture supernatants tested for binding activity against the peptide. Hybridomas having high reactivity and specificity are preferred.

[0075] Monoclonal antibodies may be isolated from the supernatants of growing hybridoma colonies. In addition, various techniques may be employed to enhance the yield, such as injection of the hybridoma cell line into the peritoneal cavity of a suitable vertebrate host, such as a mouse. Monoclonal antibodies may then be harvested from the ascites fluid or the blood. Contaminants may be removed from the antibodies by conventional techniques, such as chromatography, gel filtration, precipitation, and extraction. The peptides of this invention may be used in the purification process in, for example, an affinity chromatography step.

[0076] Within certain embodiments, the use of antigen-binding fragments of antibodies may be preferred. Such fragments include Fab fragments, which may be prepared using standard techniques. Briefly, immunoglobulins may be purified from rabbit serum by affinity chromatography on Protein A bead columns (Harlow and Lane, 1988) and digested by papain to yield Fab and Fc fragments. The Fab and Fc fragments may be separated by affinity chromatography on Protein A bead columns.

[0077] Monoclonal antibodies and fragments thereof may be coupled to one or more therapeutic agents. Suitable agents in this regard include radioactive tracers and chemotherapeutic agents, which may be used, for example, to purge autologous bone marrow in vitro). Representative therapeutic agents include radionuclides, differentiation inducers, drugs, toxins, and derivatives thereof. Preferred radionuclides include ⁹⁰Y, ¹²³I, ¹²⁵I, ¹³¹I, ¹⁸⁶Re, ¹⁸⁸Re, ²¹¹At, and ²¹²Bi. Preferred drugs include methotrexate, and pyrimidine and purine analogs. Preferred differentiation inducers include phorbol esters and butyric acid. Preferred toxins include ricin, abrin, diptheria toxin, cholera toxin, gelonin, Pseudomonas exotoxin, Shigella toxin, and pokeweed antiviral protein. For diagnostic purposes, coupling of radioactive agents may be used to facilitate tracing of metastases or to determine the location of hematological malignancy related-positive tumors.

[0078] A therapeutic agent may be coupled (e.g., covalently bonded) to a suitable monoclonal antibody either directly or indirectly (e.g., via a linker group). A direct reaction between an agent and an antibody is possible when each possesses a substituent capable of reacting with the other. For example, a nucleophilic group, such as an amino or sulfhydryl group, on one may be capable of reacting with a carbonyl-containing group, such as an anhydride or an acid halide, or with an alkyl group containing a good leaving group (e.g., a halide) on the other.

[0079] Alternatively, it may be desirable to couple a therapeutic agent and an antibody via a linker group. A linker group can function as a spacer to distance an antibody from an agent in order to avoid interference with binding capabilities. A linker group can also serve to increase the chemical reactivity of a substituent on an agent or an antibody, and thus increase the coupling efficiency. An increase in chemical reactivity may also facilitate the use of agents, or functional groups on agents, which otherwise would not be possible.

[0080] It will be evident to those skilled in the art that a variety of bifunctional or polyfunctional reagents, both homo- and hetero-functional (such as those described in the catalog of the Pierce Chemical Co., Rockford, Ill.), may be employed as the linker group. Coupling may be affected, for example, through amino groups, carboxyl groups, and sulfhydryl groups or oxidized carbohydrate residues. There are numerous references describing such methodology, e.g., U.S. Pat. No. 4,671,958.

[0081] Where a therapeutic agent is more potent when free from the antibody portion of the immunoconjugates of the present invention, it may be desirable to use a linker group that is cleavable during or upon internalization into a cell. A number of different cleavable linker groups have been described. The mechanisms for the intracellular release of an agent from these linker groups include cleavage by reduction of a disulfide bond (U.S. Pat. No. 4,489,710), by irradiation of a photolabile bond (U.S. Pat. No. 4,625,014), by hydrolysis of derivatized amino acid side chains (U.S. Pat. No. 4,638,045), by serum complement-mediated hydrolysis (U.S. Pat. No. 4,671,958), and acid-catalyzed hydrolysis (U.S. Pat. No. 4,569,789).

[0082] It may be desirable to couple more than one agent to an antibody. In one embodiment, multiple molecules of an agent are coupled to one antibody molecule. In another embodiment, more than one type of agent may be coupled to one antibody. Regardless of the particular embodiment, immunoconjugates with more than one agent may be prepared in a variety of ways. For example, more than one agent may be coupled directly to an antibody molecule, or linkers that provide multiple sites for attachment can be used. Alternatively, a carrier can be used. A carrier may bear the agents in a variety of ways, including covalent bonding either directly or via a linker group. Suitable carriers include proteins such as albumins (U.S. Pat. No. 4,507,234), peptides and polysaccharides such as aminodextran (U.S. Pat. No. 4,699,784). A carrier may also bear an agent by noncovalent bonding or by encapsulation, such as within a liposome vesicle (U.S. Pat. No. 4,429,008 and U.S. Pat. No. 4,873,088). Carriers specific for radionuclide agents include radiohalogenated small molecules and chelating compounds. For example, U.S. Pat. No. 4,735,792 discloses representative radiohalogenated small molecules and their synthesis. A radionuclide chelate may be formed from chelating compounds that include those containing nitrogen and sulfur atoms as the donor atoms for binding the metal, or metal oxide, radionuclide. For example, U.S. Pat. No. 4,673,562 discloses representative chelating compounds and their synthesis.

[0083] A variety of routes of administration for the antibodies and immunoconjugates may be used. Typically, administration will be intravenous, intramuscular, subcutaneous or in the bed of a resected tumor. It will be evident that the precise dose of the antibody/immunoconjugate will vary depending upon the antibody used, the antigen density on the tumor, and the rate of clearance of the antibody.

[0084] Also provided herein are anti-idiotypic antibodies that mimic an immunogenic portion of hematological malignancy related. Such antibodies may be raised against an antibody, or an antigen-binding fragment thereof, that specifically binds to an immunogenic portion of hematological malignancy related, using well-known techniques. Anti-idiotypic antibodies that mimic an immunogenic portion of hematological malignancy related are those antibodies that bind to an antibody, or antigen-binding fragment thereof, that specifically binds to an immunogenic portion of hematological malignancy related, as described herein.

[0085] Irrespective of the source of the original hematological malignancy related peptide-specific antibody, the intact antibody, antibody multimers, or any one of a variety of functional, antigen-binding regions of the antibody may be used in the present invention. Exemplary functional regions include scFv, Fv, Fab′, Fab and F(ab)₂ fragments of the hematological malignancy related peptide-specific antibodies. Techniques for preparing such constructs are well known to those in the art and are further exemplified herein.

[0086] The choice of antibody construct may be influenced by various factors. For example, prolonged half-life can result from the active readsorption of intact antibodies within the kidney, a property of the Fc piece of immunoglobulin. IgG based antibodies, therefore, are expected to exhibit slower blood clearance than their Fab′ counterparts. However, Fab′ fragment-based compositions will generally exhibit better tissue penetrating capability.

[0087] Antibody fragments can be obtained by proteolysis of the whole immunoglobulin by the non-specific thiol protease, papain. Papain digestion yields two identical antigen-binding fragments, termed “Fab fragments,” each with a single antigen-binding site, and a residual “Fc fragment.”

[0088] Papain should first be activated by reducing the sulfhydryl group in the active site with cysteine, 2-mercaptoethanol or dithiothreitol. Heavy metals in the stock enzyme should be removed by chelation with EDTA (2 mM) to ensure maximum enzyme activity. Enzyme and substrate are normally mixed together in the ratio of 1:100 by weight. After incubation, the reaction can be stopped by irreversible alkylation of the thiol group with iodoacetamide or simply by dialysis. The completeness of the digestion should be monitored by SDS-PAGE and the various fractions separated by Protein A-Sepharose or ion exchange chromatography.

[0089] The usual procedure for preparation of F(ab′)₂ fragments from IgG of rabbit and human origin is limited proteolysis by the enzyme pepsin. The conditions, 100× antibody excess wt./wt. in acetate buffer at pH 4.5, 37° C., suggest that antibody is cleaved at the C-terminal side of the inter-heavy-chain disulfide bond. Rates of digestion of mouse IgG may vary with subclass and it may be difficult to obtain high yields of active F(ab′)₂ fragments without some undigested or completely degraded IgG. In particular, IgG_{2b} is highly susceptible to complete degradation. The other subclasses require different incubation conditions to produce optimal results, all of which is known in the art.

[0090] Pepsin treatment of intact antibodies yields an F(ab)₂ fragment that has two antigen-combining sites and is still capable of cross-lining antigen. Digestion of rat IgG by pepsin requires conditions including dialysis in 0.1 M acetate buffer, pH 4.5, and then incubation for four hrs with 1% wt./wt. pepsin; IgG₁ and IgG₂ₐ digestion is improved if first dialyzed against 0.1 M formate buffer, pH 2.8, at 4° C., for 16 hrs followed by acetate buffer. IgG_{2b} gives more consistent results with incubation in staphylococcal V8 protease (3% wt./wt.) in 0.1 M sodium phosphate buffer, pH 7.8, for four hrs at 37° C.

[0091] A Fab fragment also contains the constant domain of the light chain and the first constant domain (CH1) of the heavy chain. Fab′ fragments differ from Fab fragments by the addition of a few residues at the carboxyl terminus of the heavy chain CH1 domain including one or more cysteine(s) from the antibody hinge region. F(ab)₂ antibody fragments were originally produced as pairs of Fab′ fragments that have hinge cysteines between them. Other chemical couplings of antibody fragments are also known.

[0092] The term “variable,” as used herein in reference to antibodies, means that certain portions of the variable domains differ extensively in sequence among antibodies, and are used in the binding and specificity of each particular antibody to its particular antigen. However, the variability is not evenly distributed throughout the variable domains of antibodies. It is concentrated in three segments termed “hypervariable regions,” both in the light chain and the heavy chain variable domains.

[0093] The more highly conserved portions of variable domains are called the framework region (FR). The variable domains of native heavy and light chains each comprise four FRs (FR1, FR2, FR3 and FR4, respectively), largely adopting a β-sheet configuration, connected by three hypervariable regions, which form loops connecting, and in some cases, forming part of, the β-sheet structure.

[0094] The hypervariable regions in each chain are held together in close proximity by the FRs and, with the hypervariable regions from the other chain, contribute to the formation of the antigen-binding site of antibodies (Kabat et al., 1991, specifically incorporated herein by reference). The constant domains are not involved directly in binding an antibody to an antigen, but exhibit various effector functions, such as participation of the antibody in antibody-dependent cellular toxicity.

[0095] The term “hypervariable region,” as used herein, refers to the amino acid residues of an antibody that are responsible for antigen-binding. The hypervariable region comprises amino acid residues from a “complementarity determining region” or “CDR” (i.e. residues 24-34 (L1), 50-56 (L2) and 89-97 (L3) in the light chain variable domain and 31-35 (H1), 50-56 (H2) and 95-102 (H3) in the heavy chain variable domain (Kabat et al., 1991, specifically incorporated herein by reference) and/or those residues from a “hypervariable loop” (i.e., residues 26-32 (L1), 50-52 (L2) and 91-96 (L3) in the light chain variable domain and 26-32 (H1), 53-55 (H2) and 96-101 (H3) in the heavy chain variable domain). “Framework” or “FR” residues are those variable domain residues other than the hypervariable region residues as herein defined.

[0096] An “Fv” fragment is the minimum antibody fragment that contains a complete antigen-recognition and binding site. This region consists of a dimer of one heavy chain and one light chain variable domain in tight, con-covalent association. It is in this configuration that three hypervariable regions of each variable domain interact to define an antigen-binding site on the surface of the V_{H}-V_{L} dimer. Collectively, six hypervariable regions confer antigen-binding specificity to the antibody. However, even a single variable domain (or half of an Fv comprising only three hypervariable regions specific for an antigen) has the ability to recognize and bind antigen, although at a lower affinity than the entire binding site.

[0097] “Single-chain Fv” or “sFv” antibody fragments comprise the V_{H} and V_{L} domains of antibody, wherein these domains are present in a single polypeptide chain. Generally, the Fv polypeptide further comprises a polypeptide linker between the V_{H} and V_{L} domains that enables the sFv to form the desired structure for antigen binding.

[0098] “Diabodies” are small antibody fragments with two antigen-binding sites, which fragments comprise a heavy chain variable domain (V_{H}) connected to a light chain variable domain (V_{L}) in the same polypeptide chain (V_{H}-V_{L}). By using a linker that is too short to allow pairing between the two domains on the same chain, the domains are forced to pair with the complementary domains of another chain and create two antigen-binding sites. Diabodies are described in European Pat. Appl. No. EP 404,097 and Intl. Pat. Appl. Publ. No. WO 93/11161, each specifically incorporated herein by reference. “Linear antibodies”, which can be bispecific or monospecific, comprise a pair of tandem Fd segments (V_{H}-C_{H}1-V_{H}-C_{H}1) that form a pair of antigen binding regions, as described in Zapata et al. (1995), specifically incorporated herein by reference.

[0099] Other types of variants are antibodies with improved biological properties relative to the parent antibody from which they are generated. Such variants, or second-generation compounds, are typically substitutional variants involving one or more substituted hypervariable region residues of a parent antibody. A convenient way for generating such substitutional variants is affinity maturation using phage display.

[0100] In affinity maturation using phage display, several hypervariable region sites (e.g., 6 to 7 sites) are mutated to generate all possible amino substitutions at each site. The antibody variants thus generated are displayed in a monovalent fashion from filamentous phage particles as fusions to the gene III product of M13 packaged within each particle. The phage-displayed variants are then screened for their biological activity (e.g., binding affinity) as herein disclosed. In order to identify candidate hypervariable region sites for modification, alanine-scanning mutagenesis can be performed on hypervariable region residues identified as contributing significantly to antigen binding.

[0101] Alternatively, or in addition, the crystal structure of the antigen-antibody complex be delineated and analyzed to identify contact points between the antibody and target. Such contact residues and neighboring residues are candidates for substitution. Once such variants are generated, the panel of variants is subjected to screening, and antibodies with analogues but different or even superior properties in one or more relevant assays are selected for further development.

[0102] In using a Fab′ or antigen binding fragment of an antibody, with the attendant benefits on tissue penetration, one may derive additional advantages from modifying the fragment to increase its half-life. A variety of techniques may be employed, such as manipulation or modification of the antibody molecule itself, and also conjugation to inert carriers. Any conjugation for the sole purpose of increasing half-life, rather than to deliver an agent to a target, should be approached carefully in that Fab′ and other fragments are chosen to penetrate tissues. Nonetheless, conjugation to non-protein polymers, such PEG and the like, is contemplated.

[0103] Modifications other than conjugation are therefore based upon modifying the structure of the antibody fragment to render it more stable, and/or to reduce the rate of catabolism in the body. One mechanism for such modifications is the use of D-amino acids in place of L-amino acids. Those of ordinary skill in the art will understand that the introduction of such modifications needs to be followed by rigorous testing of the resultant molecule to ensure that it still retains the desired biological properties. Further stabilizing modifications include the use of the addition of stabilizing moieties to either the N-terminal or the C-terminal, or both, which is generally used to prolong the half-life of biological molecules. By way of example only, one may wish to modify the termini by acylation or amination.

[0104] Moderate conjugation-type modifications for use with the present invention include incorporating a salvage receptor binding epitope into the antibody fragment. Techniques for achieving this include mutation of the appropriate region of the antibody fragment or incorporating the epitope as a peptide tag that is attached to the antibody fragment. Intl. Pat. Appl. Publ. No. WO 96/32478 is specifically incorporated herein by reference for the purposes of further exemplifying such technology. Salvage receptor binding epitopes are typically regions of three or more amino acids from one or two lops of the Fc domain that are transferred to the analogous position on the antibody fragment. The salvage receptor-binding epitopes disclosed in Intl. Pat. Appl. Publ. No. WO 98/45331 are incorporated herein by reference for use with the present invention.

[0105] 4.3 T Cell Compositions Specific for Hematological Malignancy-Related Peptides

[0106] Immunotherapeutic compositions may also, or alternatively, comprise T cells specific for hematological malignancy related. Such cells may generally be prepared in vitro or ex vivo, using standard procedures. For example, T cells may be present within (or isolated from) bone marrow, peripheral blood or a fraction of bone marrow or peripheral blood of a mammal, such as a patient, using a commercially available cell separation system, such as the Isolex™ System, available from Nexell Therapeutics, Inc. (Irvine, Calif.; see also U.S. Pat. No. 5,240,856; U.S. Pat. No. 5,215,926; Intl. Pat. Appl. Publ. No. WO 89/06280; Intl. Pat. Appl. Publ. No. WO 91/16116 and Intl. Pat. Appl. Publ. No. WO 92/07243). Alternatively, T cells may be derived from related or unrelated humans, non-human mammals, cell lines or cultures.

[0107] T cells may be stimulated with hematological malignancy related peptide, polynucleotide encoding a hematological malignancy related peptide and/or an antigen-presenting cell (APC) that expresses a hematological malignancy related peptide. Such stimulation is performed under conditions and for a time sufficient to permit the generation of T cells that are specific for the hematological malignancy related peptide. Preferably, a hematological malignancy related peptide or polynucleotide is present within a delivery vehicle, such as a microsphere, to facilitate the generation of antigen-specific T cells. Briefly, T cells, which may be isolated from a patient or a related or unrelated donor by routine techniques (such as by Ficoll/Hypaque® density gradient centrifugation of peripheral blood lymphocytes), are incubated with hematological malignancy related peptide. For example, T cells may be incubated in vitro for 2-9 days (typically 4 days) at 37° C. with hematological malignancy related peptide (e.g., 5 to 25 μg/ml) or cells synthesizing a comparable amount of hematological malignancy related peptide. It may be desirable to incubate a separate aliquot of a T cell sample in the absence of hematological malignancy related peptide to serve as a control.

[0108] T cells are considered to be specific for a hematological malignancy related peptide if the T cells kill target cells coated with a hematological malignancy related peptide or expressing a gene encoding such a peptide. T cell specificity may be evaluated using any of a variety of standard techniques. For example, within a chromium release assay or proliferation assay, a stimulation index of more than two fold increase in lysis and/or proliferation, compared to negative controls, indicates T cell specificity. Such assays may be performed, for example, as described in Chen et al. (1994). Alternatively, detection of the proliferation of T cells may be accomplished by a variety of known techniques. For example, T cell proliferation can be detected by measuring an increased rate of DNA synthesis (e.g., by pulse-labeling cultures of T cells with tritiated thymidine and measuring the amount of tritiated thymidine incorporated into DNA). Other ways to detect T cell proliferation include measuring increases in interleukin-2 (IL-2) production, Ca²⁺ flux, or dye uptake, such as 3-(4,5-dimethylthiazol-2-yl)-2,5-diphenyl-tetrazolium. Alternatively, synthesis of lymphokines (such as interferon-gamma) can be measured or the relative number of T cells that can respond to a hematological malignancy related peptide may be quantified. Contact with a hematological malignancy related peptide (200 ng/ml-100 μg/ml, preferably 100 ng/ml-25 μg/ml) for 3-7 days should result in at least a two-fold increase in proliferation of the T cells and/or contact as described above for 2-3 hrs should result in activation of the T cells, as measured using standard cytokine assays in which a two-fold increase in the level of cytokine release (e.g., TNF or IFN-γ) is indicative of T cell activation (Coligan et al., 1998). hematological malignancy related specific T cells may be expanded using standard techniques. Within preferred embodiments, the T cells are derived from a patient or a related or unrelated donor and are administered to the patient following stimulation and expansion.

[0109] T cells that have been activated in response to a hematological malignancy related peptide, polynucleotide or hematological malignancy related-expressing APC may be CD4⁺ and/or CD8⁺. Specific activation of CD4⁺ or CD8⁺ T cells may be detected in a variety of ways. Methods for detecting specific T cell activation include detecting the proliferation of T cells, the production of cytokines (e.g., lymphokines), or the generation of cytolytic activity (i.e., generation of cytotoxic T cells specific for hematological malignancy related). For CD4⁺ T cells, a preferred method for detecting specific T cell activation is the detection of the proliferation of T cells. For CD8⁺ T cells, a preferred method for detecting specific T cell activation is the detection of the generation of cytolytic activity.

[0110] For therapeutic purposes, CD4⁺ or CD8⁺ T cells that proliferate in response to the hematological malignancy related peptide, polynucleotide or APC can be expanded in number either in vitro or in vivo. Proliferation of such T cells in vitro may be accomplished in a variety of ways. For example, the T cells can be re-exposed to hematological malignancy related peptide, with or without the addition of T cell growth factors, such as interleukin-2, and/or stimulator cells that synthesize a hematological malignancy related peptide. The addition of stimulator cells is preferred where generating CD8⁺ T cell responses. T cells can be grown to large numbers in vitro with retention of specificity in response to intermittent restimulation with hematological malignancy related peptide. Briefly, for the primary in vitro stimulation (IVS), large numbers of lymphocytes (e.g., greater than 4×10⁷) may be placed in flasks with media containing human serum. hematological malignancy related peptide (e.g., peptide at 10 μg/ml) may be added directly, along with tetanus toxoid (e.g., 5 μg/ml). The flasks may then be incubated (e.g., 37° C. for 7 days). For a second IVS, T cells are then harvested and placed in new flasks with 2-3×10⁷ irradiated peripheral blood mononuclear cells. hematological malignancy related peptide (e.g., 10 μg/ml) is added directly. The flasks are incubated at 37° C. for 7 days. On day 2 and day 4 after the second IVS, 2-5 units of interleukin-2 (IL-2) may be added. For a third IVS, the T cells may be placed in wells and stimulated with the individual's own EBV transformed B cells coated with the peptide. IL-2 may be added on days 2 and 4 of each cycle. As soon as the cells are shown to be specific cytotoxic T cells, they may be expanded using a 10-day stimulation cycle with higher IL-2 (20 units) on days 2, 4 and 6.

[0111] Alternatively, one or more T cells that proliferate in the presence of hematological malignancy related peptide can be expanded in number by cloning. Methods for cloning cells are well known in the art, and include limiting dilution. Responder T cells may be purified from the peripheral blood of sensitized patients by density gradient centrifugation and sheep red cell rosetting and established in culture by stimulating with the nominal antigen in the presence of irradiated autologous filler cells. In order to generate CD4⁺ T cell lines, hematological malignancy related peptide is used as the antigenic stimulus and autologous peripheral blood lymphocytes (PBL) or lymphoblastoid cell lines (LCL) immortalized by infection with Epstein Barr virus are used as antigen-presenting cells. In order to generate CD8⁺ T cell lines, autologous antigen-presenting cells transfected with an expression vector that produces hematological malignancy related peptide may be used as stimulator cells. Established T cell lines may be cloned 2-4 days following antigen stimulation by plating stimulated T cells at a frequency of 0.5 cells per well in 96-well flat-bottom plates with 1×10⁶ irradiated PBL or LCL cells and recombinant interleukin-2 (rIL2) (50 U/ml). Wells with established clonal growth may be identified at approximately 2-3 weeks after initial plating and restimulated with appropriate antigen in the presence of autologous antigen-presenting cells, then subsequently expanded by the addition of low doses of rIL2 (10 U/ml) 2-3 days following antigen stimulation. T cell clones may be maintained in 24-well plates by periodic restimulation with antigen and rIL2 approximately every two weeks. Cloned and/or expanded cells may be administered back to the patient as described, for example, by Chang et al., (1996).

[0112] Within certain embodiments, allogeneic T-cells may be primed (i.e., sensitized to hematological malignancy related) in vivo and/or in vitro. Such priming may be achieved by contacting T cells with a hematological malignancy related peptide, a polynucleotide encoding such a peptide or a cell producing such a peptide under conditions and for a time sufficient to permit the priming of T cells. In general, T cells are considered to be primed if, for example, contact with a hematological malignancy related peptide results in proliferation and/or activation of the T cells, as measured by standard proliferation, chromium release and/or cytokine release assays as described herein. A stimulation index of more than two fold increase in proliferation or lysis, and more than three fold increase in the level of cytokine, compared to negative controls indicates T-cell specificity. Cells primed in vitro may be employed, for example, within bone marrow transplantation or as donor lymphocyte infusion.

[0113] T cells specific for hematological malignancy related can kill cells that express hematological malignancy related protein. Introduction of genes encoding T-cell receptor (TCR) chains for hematological malignancy related are used as a means to quantitatively and qualitatively improve responses to hematological malignancy related bearing leukemia and cancer cells. Vaccines to increase the number of T cells that can react to hematological malignancy related positive cells are one method of targeting hematological malignancy related bearing cells. T cell therapy with T cells specific for hematological malignancy related is another method. An alternative method is to introduce the TCR chains specific for hematological malignancy related into T cells or other cells with lytic potential. In a suitable embodiment, the TCR alpha and beta chains are cloned out from a hematological malignancy related specific T cell line and used for adoptive T cell therapy, such as described in WO 96/30516, incorporated herein by reference.

[0114] 4.4 Pharmaceutical Compositions and Vaccine Formulations

[0115] Within certain aspects, peptides, polynucleotides, antibodies and/or T cells may be incorporated into pharmaceutical compositions or immunogenic compositions (i.e., vaccines). Alternatively, a pharmaceutical composition may comprise an antigen-presenting cell (e.g., a dendritic cell) transfected with a hematological malignancy related polynucleotide such that the antigen-presenting cell expresses a hematological malignancy related peptide. Pharmaceutical compositions comprise one or more such compounds or cells and a physiologically acceptable carrier or excipient. Vaccines may comprise one or more such compounds or cells and an immunostimulant, such as an adjuvant or a liposome (into which the compound is incorporated). An immunostimulant may be any substance that enhances or potentiates an immune response (antibody- and/or cell-mediated) to an exogenous antigen. Examples of immunostimulants include adjuvants, biodegradable microspheres (e.g., polylactic galactide) and liposomes (into which the compound is incorporated) (U.S. Pat. No. 4,235,877). Vaccine preparation is generally described in, for example, Powell and Newman (1995). Pharmaceutical compositions and vaccines within the scope of the present invention may also contain other compounds, which may be biologically active or inactive. For example, one or more immunogenic portions of other tumor antigens may be present, either incorporated into a fusion peptide or as a separate compound, within the composition or vaccine.

[0116] Within certain embodiments, pharmaceutical compositions and vaccines are designed to elicit T cell responses specific for a hematological malignancy related peptide in a patient, such as a human. In general, T cell responses may be favored through the use of relatively short peptides (e.g., comprising less than 23 consecutive amino acid residues of a native hematological malignancy related peptide, preferably 4-16 consecutive residues, more preferably 8-16 consecutive residues and still more preferably 8-10 consecutive residues). Alternatively, or in addition, a vaccine may comprise an immunostimulant that preferentially enhances a T cell response. In other words, the immunostimulant may enhance the level of a T cell response to a hematological malignancy related peptide by an amount that is proportionally greater than the amount by which an antibody response is enhanced. For example, when compared to a standard oil based adjuvant, such as CFA, an immunostimulant that preferentially enhances a T cell response may enhance a proliferative T cell response by at least two fold, a lytic response by at least 10%, and/or T cell activation by at least two fold compared to hematological malignancy related-negative control cell lines, while not detectably enhancing an antibody response. The amount by which a T cell or antibody response to a hematological malignancy related peptide is enhanced may generally be determined using any representative technique known in the art, such as the techniques provided herein.

[0117] A pharmaceutical composition or vaccine may contain DNA encoding one or more of the peptides as described above, such that the peptide is generated in situ. As noted above, the DNA may be present within any of a variety of delivery systems known to those of ordinary skill in the art, including nucleic acid expression systems, bacterial and viral expression systems and mammalian expression systems. Numerous gene delivery techniques are well known in the art (Rolland, 1998, and references cited therein). Appropriate nucleic acid expression systems contain the necessary DNA, cDNA or RNA sequences for expression in the patient (such as a suitable promoter and terminating signal). Bacterial delivery systems involve the administration of a bacterium (such as Bacillus-Calmette-Guerrin) that expresses an immunogenic portion of the peptide on its cell surface or secretes such an epitope. In a preferred embodiment, the DNA may be introduced using a viral expression system (e.g., vaccinia or other pox virus, retrovirus, or adenovirus), which may involve the use of a non-pathogenic (defective), replication competent virus (Fisher-Hoch et al., 1989; Flexner et al., 1989; Flexner et al., 1990; U.S. Pat. No. 4,603,112, U.S. Pat. No. 4,769,330, U.S. Pat. No. 5,017,487; Intl. Pat. Appl. Publ. No. WO 89/01973; U.S. Pat. No. 4,777,127; Great Britain Patent No. GB 2,200,651; European Patent No. EP 0,345,242; Intl. Pat. Appl. Publ. No. WO 91/02805; Berkner, 1988; Rosenfeld et al., 1991; Kolls et al., 1994; Kass-Eisler et al, 1993; Guzman et al., 1993a; and Guzman et al., 1993). Techniques for incorporating DNA into such expression systems are well known to those of ordinary skill in the art. The DNA may also be “naked,” as described, for example, in Ulmer et al. (1993) and reviewed by Cohen (1993). The uptake of naked DNA may be increased by coating the DNA onto biodegradable beads, which are efficiently transported into the cells. It will be apparent that a vaccine may comprise both a polynucleotide and a peptide component. Such vaccines may provide for an enhanced immune response.

[0118] As noted above, a pharmaceutical composition or vaccine may comprise an antigen-presenting cell that expresses a hematological malignancy related peptide. For therapeutic purposes, as described herein, the antigen-presenting cell is preferably an autologous dendritic cell. Such cells may be prepared and transfected using standard techniques (Reeves et al., 1996; Tuting et al., 1998; and Nair et al., 1998). Expression of a hematological malignancy related peptide on the surface of an antigen-presenting cell may be confirmed by in vitro stimulation and standard proliferation as well as chromium release assays, as described herein.

[0119] It will be apparent to those of ordinary skill in the art having the benefit of the present teachings that a vaccine may contain pharmaceutically acceptable salts of the polynucleotides and peptides provided herein. Such salts may be prepared from pharmaceutically acceptable non-toxic bases, including organic bases (e.g., salts of primary, secondary and tertiary amines and basic amino acids) and inorganic bases (e.g., sodium, potassium, lithium, ammonium, calcium and magnesium salts). The phrases “pharmaceutically or pharmacologically acceptable” refer to molecular entities and compositions that do not produce an adverse, allergic or other significant untoward reaction when administered to an animal, or a human, as appropriate. As used herein, “pharmaceutically acceptable carrier” includes any and all solvents, dispersion media, coatings, antibacterial and antifungal agents, isotonic and absorption delaying agents and the like. The use of such media and agents for pharmaceutical active substances is well known in the art. Except insofar as any conventional media or agent is incompatible with the active ingredient, its use in the therapeutic compositions is contemplated. For human administration, preparations should meet sterility, pyrogenicity, and general safety and purity standards as required by the Food and Drug Administration Office of Biologics standards. Supplementary active ingredients can also be incorporated into the compositions.

[0120] While any suitable carrier known to those of ordinary skill in the art may be employed in the pharmaceutical compositions of this invention, the type of carrier will vary depending on the mode of administration. Compositions of the present invention may be formulated for any appropriate manner of administration, including for example, topical, oral, nasal, intravenous, intracranial, intraperitoneal, subcutaneous or intramuscular administration. For parenteral administration, such as subcutaneous injection, the carrier preferably comprises water, saline, alcohol, a fat, a wax or a buffer. For oral administration, any of the above carriers or a solid carrier, such as mannitol, lactose, starch, magnesium stearate, sodium saccharine, talcum, cellulose, glucose, sucrose, and magnesium carbonate, may be employed. Biodegradable microspheres (e.g., polylactate polyglycolate) may also be employed as carriers for the pharmaceutical compositions of this invention. Suitable biodegradable microspheres are disclosed, for example, in U.S. Pat. Nos. 4,897,268; 5,075,109; 5,928,647; 5,811,128; 5,820,883; 5,853,763; 5,814,344 and 5,942,252. For certain topical applications, formulation as a cream or lotion, using well-known components, is preferred.

[0121] Such compositions may also comprise buffers (e.g., neutral buffered saline or phosphate buffered saline), carbohydrates (e.g., glucose, mannose, sucrose or dextrans), mannitol, proteins, peptides or amino acids such as glycine, antioxidants, bacteriostats, chelating agents such as EDTA or glutathione, adjuvants (e.g., aluminum hydroxide), solutes that render the formulation isotonic, hypotonic or weakly hypertonic with the blood of a recipient, suspending agents, thickening agents and/or preservatives. Alternatively, compositions of the present invention may be formulated as a lyophilizate, or formulated with one or more liposomes, microspheres, nanoparticles, or micronized delivery systems using well-known technology.

[0122] Any of a variety of immunostimulants, such as adjuvants, may be employed in the preparation of vaccine compositions of this invention. Most adjuvants contain a substance designed to protect the antigen from rapid catabolism, such as aluminum hydroxide or mineral oil, and a stimulator of immune responses, such as lipid A, Bortadella pertussis or Mycobacterium tuberculosis derived proteins. Suitable adjuvants are commercially available as, for example, alum-based adjuvants (e.g., Alhydrogel, Rehydragel, aluminum phosphate, Algammulin, aluminum hydroxide); oil based adjuvants (Freund's Incomplete Adjuvant and Complete Adjuvant (Difco Laboratories, Detroit, Mich.), Specol, RIBI, TiterMax, Montanide ISA50 or Seppic MONTANIDE ISA 720); nonionic block copolymer-based adjuvants, cytokines (e.g., GM-CSF or Flat3-ligand); Merck Adjuvant 65 (Merck and Company, Inc., Rahway, N.J.); AS-2 (SmithKline Beecham, Philadelphia, Pa.); salts of calcium, iron or zinc; an insoluble suspension of acylated tyrosine; acylated sugars; cationically or anionically derivatized polysaccharides; polyphosphazenes; biodegradable microspheres; monophosphoryl lipid A and Quil A. Cytokines, such as GM-CSF or interleukin-2, -7, or -12, may also be used as adjuvants.

[0123] Hemocyanins and hemoerythrins may also be used in the invention. The use of hemocyanin from keyhole limpet (KLH) is particularly preferred, although other molluscan and arthropod hemocyanins and hemoerythrins may be employed. Various polysaccharide adjuvants may also be used. Polyamine varieties of polysaccharides are particularly preferred, such as chitin and chitosan, including deacetylated chitin.

[0124] A further preferred group of adjuvants are the muramyl dipeptide (MDP, N-acetylmuramyl-L-alanyl-D-isoglutamine) group of bacterial peptidoglycans. Derivatives of muramyl dipeptide, such as the amino acid derivative threonyl-MDP, and the fatty acid derivative MTPPE, are also contemplated.

[0125] U.S. Pat. No. 4,950,645 describes a lipophilic disaccharide-tripeptide derivative of muramyl dipeptide that is proposed for use in artificial liposomes formed from phosphatidyl choline and phosphatidyl glycerol. It is said to be effective in activating human monocytes and destroying tumor cells, but is non-toxic in generally high doses. The compounds of U.S. Pat. No. 4,950,645, and Intl. Pat. Appl. Publ. No. WO 91/16347 are also proposed for use in achieving particular aspects of the present invention.

[0126] BCG and BCG-cell wall skeleton (CWS) may also be used as adjuvants in the invention, with or without trehalose dimycolate. Trehalose dimycolate may be used itself. Azuma et al. (1988) show that trehalose dimycolate administration correlates with augmented resistance to influenza virus infection in mice. Trehalose dimycolate may be prepared as described in U.S. Pat. No. 4,579,945.

[0127] Amphipathic and surface-active agents, e.g., saponin and derivatives such as QS21 (Cambridge Biotech), form yet another group of preferred adjuvants for use with the immunogens of the present invention. Nonionic block copolymer surfactants (Rabinovich et al., 1994; Hunter et al., 1991) may also be employed. Oligonucleotides, as described by Yamamoto et al. (1988) are another useful group of adjuvants. Quil A and lentinen are also preferred adjuvants.

[0128] Superantigens are also contemplated for use as adjuvants in the present invention. “Superantigens” are generally bacterial products that stimulate a greater proportion of T lymphocytes than peptide antigens without a requirement for antigen processing (Mooney et. al., 1994). Superantigens include Staphylococcus exoproteins, such as the α, β, γ and δ enterotoxins from S. aureus and S. epidermidis, and the α, β, γ and δ E. coli exotoxins.

[0129] Common Staphylococcus enterotoxins are known as staphylococcal enterotoxin A (SEA) and staphylococcal enterotoxin B (SEB), with enterotoxins through E (SEE) being described (Rott et. al., 1992). Streptococcus pyogenes B (SEB), Clostridium perfringens enterotoxin (Bowness et. al., 1992), cytoplasmic membrane-associated protein (CAP) from S. pyogenes (Sato et. al., 1994) and toxic shock syndrome toxin-1 (TSST-1) from S. aureus (Schwab et. al., 1993) are further useful superantigens.

[0130] One group of adjuvants particularly preferred for use in the invention are the detoxified endotoxins, such as the refined detoxified endotoxin of U.S. Pat. No. 4,866,034. These refined detoxified endotoxins are effective in producing adjuvant responses in mammals.

[0131] The detoxified endotoxins may be combined with other adjuvants. Combination of detoxified endotoxins with trehalose dimycolate is contemplated, as described in U.S. Pat. No. 4,435,386. Combinations of detoxified endotoxins with trehalose dimycolate and endotoxic glycolipids is also contemplated (U.S. Pat. No. 4,505,899), as is combination of detoxified endotoxins with cell wall skeleton (CWS) or CWS and trehalose dimycolate, as described in U.S. Pat. Nos. 4,436,727, 4,436,728 and 4,505,900. Combinations of just CWS and trehalose dimycolate, without detoxified endotoxins are also envisioned to be useful, as described in U.S. Pat. No. 4,520,019.

[0132] MPL is currently one preferred immunopotentiating agent for use herein. References that concern the uses of MPL include Tomai et al. (1987), Chen et al. (1991) and Garg and Subbarao (1992), that each concern certain roles of MPL in the reactions of aging mice; Elliott et al. (1991), that concerns the D-galactosamine loaded mouse and its enhanced sensitivity to lipopolysaccharide and MPL; Chase et al. (1986), that relates to bacterial infections; and Masihi et al. (1988), that describes the effects of MPL and endotoxin on resistance of mice to Toxoplasma gondii. Fitzgerald (1991) also reported on the use of MPL to up-regulate the immunogenicty of a syphilis vaccine and to confer significant protection against challenge infection in rabbits.

[0133] Thus MPL is known to be safe for use, as shown in the above model systems. Phase-I clinical trials have also shown MPL to be safe for use (Vosika et al., 1984). Indeed, 100 μg/m² is known to be safe for human use, even on an outpatient basis (Vosika et al., 1984).

[0134] MPL generally induces polyclonal B cell activation (Baker et al., 1994), and has been shown to augment antibody production in many systems, for example, in immunologically immature mice (Baker et al., 1988); in aging mice (Tomai and Johnson, 1989); and in nude and Xid mice (Madonna and Vogel, 1986; Myers et al., 1995). Antibody production has been shown against erythrocytes (Hraba et al., 1993); T cell dependent and independent antigens; Pnu-immune vaccine (Garg and Subbarao, 1992); isolated tumor-associated antigens (U.S. Pat. No. 4,877,611); against syngeneic tumor cells (Livingston et al., 1985; Ravindranath et al., 1994a;b); and against tumor-associated gangliosides (Ravindranath et al., 1994a;b).

[0135] Another useful attribute of MPL is that is augments IgM responses, as shown by Baker et al. (1988a), who describe the ability of MPL to increase antibody responses in young mice. This is a particularly useful feature of an adjuvant for use in certain embodiments of the present invention. Myers et al. (1995) recently reported on the ability of MPL to induce IgM antibodies, by virtue T cell-independent antibody production.

[0136] In the Myers et al. (1995) studies, MPL was conjugated to the hapten, TNP. MPL was proposed for use as a carrier for other haptens, such as peptides.

[0137] MPL also activates and recruits macrophages (Verma et al., 1992). Tomai and Johnson (1989) showed that MPL-stimulated T cells enhance IL-1 secretion by macrophages. MPL is also known to activate superoxide production, lysozyme activity, phagocytosis, and killing of Candida in murine peritoneal macrophages (Chen et al., 1991).

[0138] The effects of MPL on T cells include the endogenous production of cytotoxic factors, such as TNF, in serum of BCG-primed mice by MPL (Bennett et al., 1988). Kovach et al. (1990) and Elliot et al. (1991) also show that MPL induces TNF activity. MPL is known to act with TNF-α to induce release of IFN-γ by NK cells. IFN-γ production by T cells in response to MPL was also documented by Tomai and Johnson (1989), and Odean et al. (1990).

[0139] MPL is also known to be a potent T cell adjuvant. For example, MPL stimulates proliferation of melanoma-antigen specific CTLs (Mitchell et al., 1988, 1993). Further, Baker et al. (1988b) showed that nontoxic MPL inactivated suppressor T cell activity. Naturally, in the physiological environment, the inactivation of T suppressor cells allows for increased benefit for the animal, as realized by, e.g., increased antibody production. Johnson and Tomai (1988) have reported on the possible cellular and molecular mediators of the adjuvant action of MPL.

[0140] MPL is also known to induce aggregation of platelets and to phosphorylate a platelet protein prior to induction of serotonin secretion (Grabarek et al., 1990). This study shows that MPL is involved in protein kinase C activation and signal transduction.

[0141] Many articles concern the structure and function of MPL include. These include Johnson et al. (1990), that describes the structural characterization of MPL homologs obtained from Salmonella minnesota Re595 lipopolysaccharide. The work of Johnson et al. (1990), in common with Grabarek et al. (1990), shows that the fatty acid moieties of MPL can vary, even in commercial species. In separating MPL into eight fractions by thin layer chromatography, Johnson et al. (1990) found that three were particularly active, as assessed using human platelet responses. The chemical components of the various MPL species were characterized by Johnson et al. (1990).

[0142] Baker et al. (1992) further analyzed the structural features that influence the ability of lipid A and its analogs to abolish expression of suppressor T cell activity. They reported that decreasing the number of phosphate groups in lipid A from two to one (i.e., creating monophosphoryl lipid A, MPL) as well as decreasing the fatty acyl content, primarily by removing the residue at the 3 position, resulted in a progressive reduction in toxicity; however, these structural modifications did not influence its ability to abolish the expression of Ts function (Baker et al., 1992). These types of MPL are ideal for use in the present invention.

[0143] Baker et al. (1992) also showed that reducing the fatty acyl content from five to four (lipid A precursor IV_{A} or Iₐ) eliminated the capacity to influence Ts function but not to induce polyclonal activation of B cells. These studies show that in order to be able to abolish the expression of Ts function, lipid A must be a glucosamine disaccharide; may have either one or two phosphate groups; and must have at least five fatty acyl groups. Also, the chain length of the nonhydroxylated fatty acid, as well as the location of acyloxyacyl groups (2′ versus 3′ position), may play an important role (Baker et al., 1992).

[0144] In examining the relationship between chain length and position of fatty acyl groups on the ability of lipid A to abolish the expression of suppressor T-cell (Ts) activity, Baker et al. (1994) found that fatty acyl chain lengths of C₁₂ to C₁₄ appeared to be optimal for bioactivity. Therefore, although their use is still possible, lipid A preparations with fatty acyl groups of relatively short chain length (C₁₀ to C₁₂ from Pseudomonas aeruginosa and Chromobacterium violaceum) or predominantly long chain length (C₁₈ from Helicobacter pylori) are less preferred for use in this invention.

[0145] Baker et al. (1994) also showed that the lipid A proximal inner core region oligosaccharides of some bacterial lipopolysaccharides increase the expression of Ts activity; due mainly to the capacity of such oligosaccharides, which are relatively conserved in structure among gram-negative bacterial, to enlarge or expand upon the population of CD8⁺ Ts generated during the course of a normal antibody response to unrelated microbial antigens. The minimal structure required for the expression of the added immunosuppression observed was reported to be a hexasaccharide containing one 2-keto-3-deoxyoctonate residue, two glucose residues, and three heptose residues to which are attached two pyrophosphorylethanolamine groups (Baker et al., 1994). This information may be considered in utilizing or even designing further adjuvants for use in the invention.

[0146] In a generally related line of work, Tanamoto et al. (1994a;b; 1995) described the dissociation of endotoxic activities in a chemically synthesized Lipid A precursor after acetylation or succinylation. Thus, compounds such as “acetyl 406” and “succinyl 516” (Tanamoto et al., 1994a;b; 1995) are also contemplated for use in the invention

[0147] Synthetic MPLs form a particularly preferred group of antigens. For example, Brade et al. (1993) described an artificial glycoconjugate containing the bisphosphorylated glucosamine disaccharide backbone of lipid A that binds to anti-Lipid A MAbs. This is one candidate for use in certain aspects of the invention.

[0148] The MPL derivatives described in U.S. Pat. No. 4,987,237 are particularly contemplated for use in the present invention. U.S. Pat. No. 4,987,237 describes MPL derivatives that contain one or more free groups, such as amines, on a side chain attached to the primary hydroxyl groups of the monophosphoryl lipid A nucleus through an ester group. The derivatives provide a convenient method for coupling the lipid A through coupling agents to various biologically active materials. The immunostimulant properties of lipid A are maintained. All MPL derivatives in accordance with U.S. Pat. No. 4,987,237 are envisioned for use in the MPL adjuvant-incorporated cells of this invention.

[0149] Various adjuvants, even those that are not commonly used in humans, may still be employed in animals, where, for example, one desires to raise antibodies or to subsequently obtain activated T cells. The toxicity or other adverse effects that may result from either the adjuvant or the cells, e.g., as may occur using non-irradiated tumor cells, is irrelevant in such circumstances.

[0150] Within the vaccines provided herein, the adjuvant composition is preferably designed to induce an immune response predominantly of the Th1 type. High levels of Th1-type cytokines (e.g., IFN-γ, TNFα, IL-2 and IL-12) tend to favor the induction of cell-mediated immune responses to an administered antigen. In contrast, high levels of Th2-type cytokines (e.g., IL-4, IL-5, IL-6 and IL-10) tend to favor the induction of humoral immune responses. Following application of a vaccine as provided herein, a patient will support an immune response that includes Th1- and Th2-type responses. Within a preferred embodiment, in which a response is predominantly Th1-type, the level of Th1-type cytokines will increase to a greater extent than the level of Th2-type cytokines. The levels of these cytokines may be readily assessed using standard assays. For a review of the families of cytokines see e.g., Mosmann and Coffman (1989).

[0151] Preferred adjuvants for use in eliciting a predominantly Th1-type response include, for example, a combination of monophosphoryl lipid A, preferably 3-de-O-acylated monophosphoryl lipid A (3D-MPL), together with an aluminum salt. MPL adjuvants are available from Corixa Corporation (Seattle, Wash.; see e.g., U.S. Pat. Nos. 4,436,727; 4,877,611; 4,866,034 and 4,912,094, each of which is specifically incorporated herein by reference in its entirety). CpG-containing oligonucleotides (in which the CpG dinucleotide is unmethylated) also induce a predominantly Th1 response. Such oligonucleotides are well known and are described, for example, in Intl. Pat. Appl. Publ. No. WO 96/02555 and Intl. Pat. Appl. Publ. No. WO 99/33488. Immunostimulatory DNA sequences are also described, for example, by Sato et al. (1996). Another preferred adjuvant is a saponin, preferably QS21 (Aquila Biopharmaceuticals Inc., Framingham, Mass.), which may be used alone or in combination with other adjuvants. For example, an enhanced system involves the combination of a monophosphoryl lipid A and saponin derivative, such as the combination of QS21 and 3D-MPL (see e.g., Intl. Pat. Appl. Publ. No. WO 94/00153), or a less reactogenic composition where the QS21 is quenched with cholesterol (see e.g., Intl. Pat. Appl. Publ. No. WO 96/33739). Other preferred formulations comprise an oil-in-water emulsion and tocopherol. A particularly potent adjuvant formulation involving QS21, 3D-MPL and tocopherol in an oil-in-water emulsion has also been described (see e.g., Intl. Pat. Appl. Publ. No. WO 95/17210).

[0152] Other preferred adjuvants include Montanide ISA 720 (Seppic), SAF (Chiron), ISCOMS (CSL), MF-59 (Chiron), the SBAS series of adjuvants (e.g., SBAS-2 or SBAS-4, available from SmithKline Beecham, Rixensart, Belgium), Detox (Corixa Corporation), RC-529 (Corixa Corporation) and aminoalkyl glucosaminide 4-phosphates (AGPs).

[0153] Any vaccine provided herein may be prepared using well-known methods that result in a combination of one or more antigens, one or more immunostimulants or adjuvants and one or more suitable carriers, excipients, or pharmaceutically acceptable buffers. The compositions described herein may be administered as part of a sustained release formulation (i.e., a formulation such as a capsule, sponge or gel [composed of polysaccharides, for example] that effects a slow release of compound following administration). Such formulations may generally be prepared using well-known technology (Coombes et al., 1996) and administered by, for example, oral, rectal or subcutaneous implantation, or by implantation at the desired target site. Sustained-release formulations may contain a peptide, polynucleotide or antibody dispersed in a carrier matrix and/or contained within a reservoir surrounded by a rate-controlling membrane.

[0154] Carriers for use within such formulations are preferably biocompatible, and may also be biodegradable; preferably the formulation provides a relatively constant level of active component release. Such carriers include microparticles of poly(lactide-co-glycolide), as well as polyacrylate, latex, starch, cellulose and dextran. Other delayed-release carriers include supramolecular biovectors, which comprise a non-liquid hydrophilic core (e.g. a cross-linked polysaccharide or oligosaccharide) and, optionally, an external layer comprising an amphiphilic compound, such as a phospholipid (U.S. Pat. No. 5,151,254; Intl. Pat. Appl. Publ. No. WO 94/20078; Intl. Pat. Appl. Publ. No. WO/94/23701; and Intl. Pat. Appl. Publ. No. WO 96/06638). The amount of active compound contained within a sustained release formulation depends upon the site of implantation, the rate and expected duration of release and the nature of the condition to be treated or prevented.

[0155] Any of a variety of delivery vehicles may be employed within pharmaceutical compositions and vaccines to facilitate production of an antigen-specific immune response that targets tumor cells. Delivery vehicles include antigen-presenting cells (APCs), such as dendritic cells, macrophages, B cells, monocytes and other cells that may be engineered to be efficient APCs. Such cells may, but need not, be genetically modified to increase the capacity for presenting the antigen, to improve activation and/or maintenance of the T cell response, to have anti-tumor effects per se and/or to be immunologically compatible with the receiver (i.e., matched HLA haplotype). APCs may generally be isolated from any of a variety of biological fluids and organs, including tumor and peritumoral tissues, and may be autologous, allogeneic, syngeneic or xenogeneic cells.

[0156] Certain preferred embodiments of the present invention use dendritic cells or progenitors thereof as antigen-presenting cells. Dendritic cells are highly potent APCs (Banchereau and Steinman, 1998) and have been shown to be effective as a physiological adjuvant for eliciting prophylactic or therapeutic antitumor immunity (Timmerman and Levy, 1999). In general, dendritic cells may be identified based on their typical shape (stellate in situ, with marked cytoplasmic processes (dendrites) visible in vitro), their ability to take up, process and present antigens with high efficiency and their ability to activate naive T cell responses. Dendritic cells may, of course, be engineered to express specific cell-surface receptors or ligands that are not commonly found on dendritic cells in vivo or ex vivo, and such modified dendritic cells are contemplated by the present invention. As an alternative to dendritic cells, secreted vesicles antigen-loaded dendritic cells (called exosomes) may be used within a vaccine (Zitvogel et al., 1998).

[0157] Dendritic cells and progenitors may be obtained from peripheral blood, bone marrow, tumor-infiltrating cells, peritumoral tissues-infiltrating cells, lymph nodes, spleen, skin, umbilical cord blood or any other suitable tissue or fluid. For example, dendritic cells may be differentiated ex vivo by adding a combination of cytokines such as GM-CSF, IL-4, IL-13 and/or TNFα to cultures of monocytes harvested from peripheral blood. Alternatively, CD34 positive cells harvested from peripheral blood, umbilical cord blood or bone marrow may be differentiated into dendritic cells by adding to the culture medium combinations of GM-CSF, IL-3, TNFα, CD40 ligand, LPS, flt3 ligand and/or other compound(s) that induce differentiation, maturation and proliferation of dendritic cells.

[0158] Dendritic cells are conveniently categorized as “immature” and “mature” cells, which allows a simple way to discriminate between two well characterized phenotypes. However, this nomenclature should not be construed to exclude all possible intermediate stages of differentiation. Immature dendritic cells are characterized as APC with a high capacity for antigen uptake and processing, which correlates with the high expression of Fcγ receptor and mannose receptor. The mature phenotype is typically characterized by a lower expression of these markers, but a high expression of cell surface molecules responsible for T cell activation such as class I and class II MHC, adhesion molecules (e.g., CD54 and CD11) and costimulatory molecules (e.g., CD40, CD80, CD86 and 4-1BB).

[0159] APCs may generally be transfected with a polynucleotide encoding a hematological malignancy related peptide, such that the peptide, or an immunogenic portion thereof, is expressed on the cell surface. Such transfection may take place ex vivo, and a composition or vaccine comprising such transfected cells may then be used for therapeutic purposes, as described herein. Alternatively, a gene delivery vehicle that targets a dendritic or other antigen-presenting cell may be administered to a patient, resulting in transfection that occurs in vivo. In vivo and ex vivo transfection of dendritic cells, for example, may generally be performed using any methods known in the art, such as those described in Intl. Pat. Appl. Publ. No. WO 97/24447, or the gene gun approach described by Mahvi et al. (1997). Antigen loading of dendritic cells may be achieved by incubating dendritic cells or progenitor cells with the hematological malignancy related peptide, DNA (naked or within a plasmid vector) or RNA; or with antigen-expressing recombinant bacterium or viruses (e.g., vaccinia, fowlpox, adenovirus or lentivirus vectors). Prior to loading, the peptide may be covalently conjugated to an immunological partner that provides T cell help (e.g., a carrier molecule). Alternatively, a dendritic cell may be pulsed with a non-conjugated immunological partner, separately or in the presence of the peptide.

[0160] Combined therapeutics is also contemplated, and the same type of underlying pharmaceutical compositions may be employed for both single and combined medicaments. Vaccines and pharmaceutical compositions may be presented in unit-dose or multi-dose containers, such as sealed ampoules or vials. Such containers are preferably hermetically sealed to preserve sterility of the formulation until use. In general, formulations may be stored as suspensions, solutions or emulsions in oily or aqueous vehicles. Alternatively, a vaccine or pharmaceutical composition may be stored in a freeze-dried condition requiring only the addition of a sterile liquid carrier immediately prior to use.

[0161] 4.5 Diagnostic and Prognostic Methods for Hematological Malignancy Diseases

[0162] The present invention further provides methods for detecting a malignant disease associated with one or more of the polypeptide or polynucleotide compositions disclosed herein, and for monitoring the effectiveness of an immunization or therapy for such a disease. To determine the presence or absence of a malignant disease associated with one or more of the polypeptide or polynucleotide compositions disclosed herein, a patient may be tested for the level of T cells specific for one or more of such compositions. Within certain methods, a biological sample comprising CD4⁺ and/or CD8⁺ T cells isolated from a patient is incubated with one or more of the polypeptide or polynucleotide compositions disclosed herein, and/or an APC that expresses one or more of such peptides or polypeptides, and the presence or absence of specific activation of the T cells is detected, as described herein. Suitable biological samples include, but are not limited to, isolated T cells. For example, T cells may be isolated from a patient by routine techniques (such as by Ficoll/Hypaque density gradient centrifugation of peripheral blood lymphocytes). T cells may be incubated in vitro for 2-9 days (typically 4 days) at 37° C. with one or more of the disclosed peptide, polypeptide or polynucleotide compositions (e.g., 5-25 μg/ml). It may be desirable to incubate another aliquot of a T cell sample in the absence of the composition to serve as a control. For CD4⁺ T cells, activation is preferably detected by evaluating proliferation of the T cells. For CD8⁺ T cells, activation is preferably detected by evaluating cytolytic activity. A level of proliferation that is at least two fold greater and/or a level of cytolytic activity that is at least 20% greater than in disease-free patients indicates the presence of a malignant disease associated with expression or one or more of the disclosed polypeptide or polynucleotide compositions. Further correlation may be made, using methods well known in the art, between the level of proliferation and/or cytolytic activity and the predicted response to therapy. In particular, patients that display a higher antibody, proliferative and/or lytic response may be expected to show a greater response to therapy.

[0163] Within other methods, a biological sample obtained from a patient is tested for the level of antibody specific for one or more of the hematological malignancy-related peptides or polypeptide s disclosed herein. The biological sample is incubated with hematological malignancy-related peptide or polypeptide, or a polynucleotide encoding such a peptide or polypeptide, and/or an APC that expresses such a peptide or polypeptide under conditions and for a time sufficient to allow immunocomplexes to form. Immunocomplexes formed between the selected peptide or polypeptide and antibodies in the biological sample that specifically bind to the selected peptide or polypeptide are then detected. A biological sample for use within such methods may be any sample obtained from a patient that would be expected to contain antibodies. Suitable biological samples include blood, sera, ascites, bone marrow, pleural effusion, and cerebrospinal fluid.

[0164] The biological sample is incubated with the selected peptide or polypeptide in a reaction mixture under conditions and for a time sufficient to permit immunocomplexes to form between the selected peptide or polypeptide and antibodies that are immunospecific for such a peptide or polypeptide. For example, a biological sample and a selected peptide or polypeptide peptide may be incubated at 4° C. for 24-48 hrs.

[0165] Following the incubation, the reaction mixture is tested for the presence of immuno-complexes. Detection of immunocomplexes formed between the selected peptide or polypeptide and antibodies present in the biological sample may be accomplished by a variety of known techniques, such as radioimmunoassays (RIA) and enzyme linked immunosorbent assays (ELISA). Suitable assays are well known in the art and are amply described in the scientific and patent literature (Harlow and Lane, 1988). Assays that may be used include, but are not limited to, the double monoclonal antibody sandwich immunoassay technique (U.S. Pat. No. 4,376,110); monoclonal-polyclonal antibody sandwich assays (Wide et al., 1970); the “western blot” method (U.S. Pat. No. 4,452,901); immunoprecipitation of labeled ligand (Brown et al., 1980); enzyme-linked immunosorbent assays (Raines and Ross, 1982); immunocytochemical techniques, including the use of fluorochromes (Brooks et al., 1980); and neutralization of activity (Bowen-Pope et al., 1984). Other immunoassays include, but are not limited to, those described in U.S. Pat. Nos. 3,817,827; 3,850,752; 3,901,654; 3,935,074; 3,984,533; 3,996,345; 4,034,074; and 4,098,876.

[0166] For detection purposes, the selected peptide or polypeptide may either be labeled or unlabeled. Unlabeled polypeptide peptide may be used in agglutination assays or in combination with labeled detection reagents that bind to the immunocomplexes (e.g., anti-immunoglobulin, protein G, Protein A or a lectin and secondary antibodies, or antigen-binding fragments thereof, capable of binding to the antibodies that specifically bind to the selected hematological malignancy-related peptide or polypeptide). If the selected peptide or polypeptide is labeled, the reporter group may be any suitable reporter group known in the art, including radioisotopes, fluorescent groups, luminescent groups, enzymes, biotin and dye particles.

[0167] Within certain assays, unlabeled peptide or polypeptide is immobilized on a solid support. The solid support may be any material known to those of ordinary skill in the art to which the peptide may be attached. For example, the solid support may be a test well in a microtiter plate or a nitrocellulose or other suitable membrane. Alternatively, the support may be a bead or disc, such as glass, fiberglass, latex or a plastic material such as polystyrene or polyvinylchloride. The support may also be a magnetic particle or a fiber optic sensor, such as those disclosed, for example, in U.S. Pat. No. 5,359,681. The peptide may be immobilized on the solid support using a variety of techniques known to those of skill in the art, which are amply described in the patent and scientific literature. In the context of the present invention, the term “immobilization” refers to both noncovalent association, such as adsorption, and covalent attachment (which may be a direct linkage between the antigen and functional groups on the support or may be a linkage by way of a cross-linking agent). Immobilization by adsorption to a well in a microtiter plate or to a membrane is preferred. In such cases, adsorption may be achieved by contacting the selected peptide or polypeptide, in a suitable buffer, with the solid support for a suitable amount of time. The contact time varies with temperature, but is typically between about 1 hour and about 1 day. In general, contacting a well of a plastic microtiter plate (such as polystyrene or polyvinylchloride) with an amount of peptide ranging from about 10 ng to about 10 μg, and preferably about 100 ng to about 1 μg, is sufficient to immobilize an adequate amount of peptide.

[0168] Following immobilization, the remaining protein binding sites on the support are typically blocked. Any suitable blocking agent known to those of ordinary skill in the art, such as bovine serum albumin, Tween™ 20™ (Sigma Chemical Co., St. Louis, Mo.), heat-inactivated normal goat serum (NGS), or BLOTTO (buffered solution of nonfat dry milk which also contains a preservative, salts, and an antifoaming agent) may be used. The support is then incubated with a biological sample suspected of containing specific antibody. The sample can be applied neat, or, more often, it can be diluted, usually in a buffered solution which contains a small amount (0.1%-5.0% by weight) of protein, such as BSA, NGS, or BLOTTO. In general, an appropriate contact time (i.e., incubation time) is a period of time that is sufficient to detect the presence of antibody or an antigen binding fragment that is immunospecific for the selected peptide or polypeptide within a sample containing such an antibody or binding fragment thereof. Preferably, the contact time is sufficient to achieve a level of binding that is at least about 95% of that achieved at equilibrium between bound and unbound antibody or antibody fragment. Those of ordinary skill in the art will recognize that the time necessary to achieve equilibrium may be readily determined by assaying the level of binding that occurs over a period of time. At room temperature, an incubation time of about 30 min is generally sufficient.

[0169] Unbound sample may then be removed by washing the solid support with an appropriate buffer, such as PBS containing 0.1% Tween™ 20. A detection reagent that binds to the immunocomplexes and that comprises at least a first detectable label or “reporter” molecule may then be added. The detection reagent is incubated with the immunocomplex for an amount of time sufficient to detect the bound antibody or antigen binding fragment thereof. An appropriate amount of time may generally be determined by assaying the level of binding that occurs over a period of time. Unbound label or detection reagent is then removed and bound label or detection reagent is detected using a suitable assay or analytical instrument. The method employed for detecting the reporter group depends upon the nature of the reporter group. For radioactive labels, scintillation counting or autoradiographic methods are generally appropriate. Spectroscopic methods may be used to detect dyes, luminescent or chemiluminescent moieties and various chromogens, fluorescent labels and such like. Biotin may be detected using avidin, coupled to a different reporter group (commonly a radioactive or fluorescent group or an enzyme). Enzyme reporter groups (e.g., horseradish peroxidase, β-galactosidase, alkaline phosphatase and glucose oxidase) may generally be detected by the addition of substrate (generally for a specific period of time), followed by spectroscopic or other analysis of the reaction products. Regardless of the specific method employed, a level of bound detection reagent that is at least two fold greater than background (i.e., the level observed for a biological sample obtained from a disease-free individual) indicates the presence of a malignant disease associated with expression of the selected peptide or polypeptide.

[0170] In general, methods for monitoring the effectiveness of an immunization or therapy involve monitoring changes in the level of antibodies or T cells specific for the selected peptide or polypeptide in a sample, or in an animal such as a human patient. Methods in which antibody levels are monitored may comprise the steps of: (a) incubating a first biological sample, obtained from a patient prior to a therapy or immunization, with a selected peptide or polypeptide, wherein the incubation is performed under conditions and for a time sufficient to allow immunocomplexes to form; (b) detecting immunocomplexes formed between the selected peptide or polypeptide and antibodies or antigen binding fragments in the biological sample that specifically bind to the selected peptide or polypeptide; (c) repeating steps (a) and (b) using a second biological sample taken from the patient at later time, such as for example, following a given therapy or immunization; and (d) comparing the number of immunocomplexes detected in the first and second biological samples. Alternatively, a polynucleotide encoding the selected peptide or polypeptide, or an APC expressing the selected peptide or polypeptide may be employed in place of the selected peptide or polypeptide itself. Within such methods, immunocomplexes between the selected peptide or polypeptide encoded by a polynucleotide, or expressed by the APC, and antibodies and/or antigen binding fragments in the biological sample are detected.

[0171] Methods in which T cell activation and/or the number of hematological malignancy polypeptide-specific precursors are monitored may comprise the steps of: (a) incubating a first biological sample comprising CD4⁺ and/or CD8⁺ cells (e.g., bone marrow, peripheral blood or a fraction thereof), obtained from a patient prior to a therapy or immunization, with a hematological malignancy peptide or polypeptide, wherein the incubation is performed under conditions and for a time sufficient to allow specific activation, proliferation and/or lysis of T cells; (b) detecting an amount of activation, proliferation and/or lysis of the T cells; (c) repeating steps (a) and (b) using a second biological sample comprising CD4⁺ and/or CD8⁺ T cells, and taken from the same patient following therapy or immunization; and (d) comparing the amount of activation, proliferation and/or lysis of T cells in the first and second biological samples. Alternatively, a polynucleotide encoding a hematological malignancy related peptide, or an APC expressing such a peptide may be employed in place of the hematological malignancy peptide itself.

[0172] A biological sample for use within such methods may be any sample obtained from a patient that would be expected to contain antibodies, CD4⁺ T cells and/or CD8⁺ T cells. Suitable biological samples include blood, sera, ascites, bone marrow, pleural effusion and cerebrospinal fluid. A first biological sample may be obtained prior to initiation of therapy or immunization or part way through a therapy or vaccination regime. The second biological sample should be obtained in a similar manner, but at a time following additional therapy or immunization. The second biological sample may be obtained at the completion of, or part way through, therapy or immunization, provided that at least a portion of therapy or immunization takes place between the isolation of the first and second biological samples.

[0173] Incubation and detection steps for both samples may generally be performed as described above. A statistically significant increase in the number of immunocomplexes in the second sample relative to the first sample reflects successful therapy or immunization.

[0174] 4.6 Administration of Pharmaceutical Compositions and Formulations

[0175] In certain embodiments, the present invention concerns formulation of one or more of the polynucleotide, polypeptide, peptide, antibody, or antigen binding fragment compositions disclosed herein in pharmaceutically acceptable solutions for administration to a cell or an animal either alone, or in combination with one or more other modalities of anti-cancer therapy, or in combination with one or more diagnostic or therapeutic agents.

[0176] It will also be understood that, if desired, the nucleic acid segment, RNA, or DNA compositions disclosed herein may be administered in combination with other agents as well such as, e.g., proteins or peptides or various pharmaceutically-active agents. As long as the composition comprises at least one of the genetic expression constructs disclosed herein, there is virtually no limit to other components that may also be included, given that the additional agents do not cause a significant adverse effect upon contact with the target cells or host tissues. The RNA- or DNA-derived compositions may thus be delivered along with various other agents as required in the particular instance. Such RNA or DNA compositions may be purified from host cells or other biological sources, or alternatively may be chemically synthesized as described herein. Likewise, such compositions may comprise substituted or derivatized RNA or DNA compositions. Such compositions may include one or more therapeutic gene constructs, either alone, or in combination with one or more modified peptide or nucleic acid substituent derivatives, and/or other anticancer therapeutics.

[0177] The formulation of pharmaceutically-acceptable excipients and carrier solutions are well-known to those of skill in the art, as is the development of suitable dosing and treatment regimens for using the particular compositions described herein in a variety of treatment regimens, including e.g., oral, intravenous, intranasal, transdermal, intraprostatic, intratumoral, and/or intramuscular administration and formulation.

[0178] 4.6.1 Injectable Delivery

[0179] For example, the pharmaceutical compositions disclosed herein may be administered parenterally, intravenously, intramuscularly, or even intraperitoneally as described in U.S. Pat. No. 5,543,158, U.S. Pat. No. 5,641,515 and U.S. Pat. No. 5,399,363 (each specifically incorporated herein by reference in its entirety). Solutions of the active compounds as free-base or pharmacologically acceptable salts may be prepared in water suitably mixed with a surfactant, such as hydroxypropylcellulose. Dispersions may also be prepared in glycerol, liquid polyethylene glycols, and mixtures thereof and in oils. Under ordinary conditions of storage and use, these preparations contain a preservative to prevent the growth of microorganisms.

[0180] The pharmaceutical forms suitable for injectable use include sterile aqueous solutions or dispersions and sterile powders for the extemporaneous preparation of sterile injectable solutions or dispersions (U.S. Pat. No. 5,466,468, specifically incorporated herein by reference in its entirety). In all cases the form must be sterile and must be fluid to the extent that easy syringability exists. It must be stable under the conditions of manufacture and storage and must be preserved against the contaminating action of microorganisms, such as bacteria and fungi. The carrier can be a solvent or dispersion medium containing, for example, water, ethanol, polyol (e.g., glycerol, propylene glycol, and liquid polyethylene glycol, and the like), suitable mixtures thereof, and/or vegetable oils. Proper fluidity may be maintained, for example, by the use of a coating, such as lecithin, by the maintenance of the required particle size in the case of dispersion and by the use of surfactants. The prevention of the action of microorganisms can be brought about by various antibacterial and antifungal agents, for example, parabens, chlorobutanol, phenol, sorbic acid, thimerosal, and the like. In many cases, it will be preferable to include isotonic agents, for example, sugars or sodium chloride. Prolonged absorption of the injectable compositions can be brought about by the use in the compositions of agents delaying absorption, for example, aluminum monostearate and gelatin.

[0181] For parenteral administration in an aqueous solution, for example, the solution should be suitably buffered if necessary and the liquid diluent first rendered isotonic with sufficient saline or glucose. These particular aqueous solutions are especially suitable for intravenous, intramuscular, subcutaneous and intraperitoneal administration. In this connection, sterile aqueous media that can be employed will be known to those of skill in the art in light of the present disclosure. For example, one dosage may be dissolved in 1 ml of isotonic NaCl solution and either added to 1000 ml of hypodermoclysis fluid or injected at the proposed site of infusion, (see for example, Hoover, 1975). Some variation in dosage will necessarily occur depending on the condition of the subject being treated. The person responsible for administration will, in any event, determine the appropriate dose for the individual subject. Moreover, for human administration, preparations should meet sterility, pyrogenicity, and general safety and purity standards as required by FDA Office of Biologics standards.

[0182] Sterile injectable solutions may be prepared by incorporating the gene therapy constructs in the required amount in the appropriate solvent with several of the other ingredients enumerated above, as required, followed by filtered sterilization. Generally, dispersions are prepared by incorporating the various sterilized active ingredients into a sterile vehicle which contains the basic dispersion medium and the required other ingredients from those enumerated above. In the case of sterile powders for the preparation of sterile injectable solutions, the preferred methods of preparation are vacuum-drying and freeze-drying techniques which yield a powder of the active ingredient plus any additional desired ingredient from a previously sterile-filtered solution thereof.

[0183] The compositions disclosed herein may be formulated in a neutral or salt form Pharmaceutically-acceptable salts, include the acid addition salts and which are formed with inorganic acids such as, for example, hydrochloric or phosphoric acids, or such organic acids as acetic, oxalic, tartaric, mandelic, and the like. Salts formed with the free carboxyl groups can also be derived from inorganic bases such as, for example, sodium, potassium, ammonium, calcium, or ferric hydroxides, and such organic bases as isopropylamine, trimethylamine, histidine, procaine and the like. Upon formulation, solutions will be administered in a manner compatible with the dosage formulation and in such amount as is therapeutically effective. The formulations are easily administered in a variety of dosage forms such as injectable solutions, drug release capsules and the like.

[0184] As used herein, “carrier” includes any and all solvents, dispersion media, vehicles, coatings, diluents, antibacterial and antifungal agents, isotonic and absorption delaying agents, buffers, carrier solutions, suspensions, colloids, and the like. The use of such media and agents for pharmaceutical active substances is well known in the art. Except insofar as any conventional media or agent is incompatible with the active ingredient, its use in the therapeutic compositions is contemplated. Supplementary active ingredients can also be incorporated into the compositions.

[0185] 4.6.2 Intranasal Delivery

[0186] One may use nasal solutions or sprays, aerosols or even inhalants for the treatment of hematological malignancies with one of more of the disclosed peptides and polynucleotides. Nasal solutions are usually aqueous solutions designed for administration to the nasal passages in drops or sprays. Nasal solutions are prepared so that they are similar in many respects to nasal secretions, so that normal ciliary action is maintained. Thus, the aqueous nasal solutions usually are isotonic and slightly buffered to maintain a pH of from about 5.5 to about 6.5. In addition, antimicrobial preservatives, similar to those used in ophthalmic preparations, and appropriate drug stabilizers, if required, may be included in the formulation. Various commercial nasal preparations are known.

[0187] Inhalations and inhalants are pharmaceutical preparations designed for delivering a drug or compound into the respiratory tree of a patient. A vapor or mist is administered and reaches the affected area, often to give relief from symptoms of bronchial and nasal congestion. However, this route can also be employed to deliver agents into the systemic circulation. Inhalations may be administered by the nasal or oral respiratory routes. The administration of inhalation solutions is only effective if the droplets are sufficiently fine and uniform in size so that the mist reaches the bronchioles.

[0188] Another group of products, also known as inhalations, and sometimes called insufflations, consists of finely powdered or liquid drugs that are carried into the respiratory passages by the use of special delivery systems, such as pharmaceutical aerosols, that hold a solution or suspension of the drug in a liquefied gas propellant. When released through a suitable valve and oral adapter, a metered does of the inhalation is propelled into the respiratory tract of the patient.

[0189] Particle size is of importance in the administration of this type of preparation. It has been reported that the optimum particle size for penetration into the pulmonary cavity is of the order of about 0.5 to about 7 μm. Fine mists are produced by pressurized aerosols and hence their use in considered advantageous.

[0190] 4.6.3 Liposome-, Nanocapsule-, and Microparticle-Mediated Delivery

[0191] In certain embodiments, the inventors contemplate the use of liposomes, nanocapsules, microparticles, microspheres, lipid particles, vesicles, and the like, for the introduction of the polynucleotide compositions of the present invention into suitable host cells. In particular, the polynucleotide compositions of the present invention may be formulated for delivery either encapsulated in a lipid particle, a liposome, a vesicle, a nanosphere, or a nanoparticle or the like.

[0192] Such formulations may be preferred for the introduction of pharmaceutically acceptable formulations of the nucleic acids disclosed herein. The formation and use of liposomes is generally known to those of skill in the art (see for example, Couvreur et al., 1977; Couvreur, 1988; Lasic, 1998; which describes the use of liposomes and nanocapsules in the targeted antibiotic therapy for intracellular bacterial infections and diseases). Recently, liposomes were developed with improved serum stability and circulation half-lives (Gabizon and Papahadjopoulos, 1988; Allen and Choun, 1987; U.S. Pat. No. 5,741,516, specifically incorporated herein by reference in its entirety). Further, various methods of liposome and liposome like preparations as potential drug carriers have been reviewed (Takakura, 1998; Chandran et al., 1997; Margalit, 1995; U.S. Pat. No. 5,567,434; U.S. Pat. No. 5,552,157; U.S. Pat. No. 5,565,213; U.S. Pat. No. 5,738,868 and U.S. Pat. No. 5,795,587, each specifically incorporated herein by reference in its entirety).

[0193] Liposomes have been used successfully with a number of cell types that are normally resistant to transfection by other procedures including T cell suspensions, primary hepatocyte cultures and PC12 cells (Renneisen et al., 1990; Muller et al., 1990). In addition, liposomes are free of the DNA length constraints that are typical of viral-based delivery systems. Liposomes have been used effectively to introduce genes, drugs (Heath and Martin, 1986; Heath et al., 1986; Balazsovits et al., 1989; Fresta and Puglisi, 1996), radiotherapeutic agents (Pikul et al., 1987), enzymes (Imaizumi et al., 1990a; Imaizumi et al., 1990b), viruses (Faller and Baltimore, 1984), transcription factors and allosteric effectors (Nicolau and Gersonde, 1979) into a variety of cultured cell lines and animals. In addition, several successful clinical trails examining the effectiveness of liposome-mediated drug delivery have been completed (Lopez-Berestein et al., 1985a; 1985b; Coune, 1988; Sculier et al., 1988). Furthermore, several studies suggest that the use of liposomes is not associated with autoimmune responses, toxicity or gonadal localization after systemic delivery (Mori and Fukatsu, 1992).

[0194] Liposomes are formed from phospholipids that are dispersed in an aqueous medium and spontaneously form multilamellar concentric bilayer vesicles (also termed multilamellar vesicles (MLVs). MLVs generally have diameters of from 25 nm to 4 μm. Sonication of MLVs results in the formation of small unilamellar vesicles (SUVs) with diameters in the range of 200 to 500 Å, containing an aqueous solution in the core.

[0195] Liposomes bear resemblance to cellular membranes and are contemplated for use in connection with the present invention as carriers for the peptide compositions. They are widely suitable as both water- and lipid-soluble substances can be entrapped, i.e. in the aqueous spaces and within the bilayer itself, respectively. It is possible that the drug-bearing liposomes may even be employed for site-specific delivery of active agents by selectively modifying the liposomal formulation.

[0196] In addition to the teachings of Couvreur et al. (1977; 1988), the following information may be utilized in generating liposomal formulations. Phospholipids can form a variety of structures other than liposomes when dispersed in water, depending on the molar ratio of lipid to water. At low ratios the liposome is the preferred structure. The physical characteristics of liposomes depend on pH, ionic strength and the presence of divalent cations. Liposomes can show low permeability to ionic and polar substances, but at elevated temperatures undergo a phase transition which markedly alters their permeability. The phase transition involves a change from a closely packed, ordered structure, known as the gel state, to a loosely packed, less-ordered structure, known as the fluid state. This occurs at a characteristic phase-transition temperature and results in an increase in permeability to ions, sugars, and drugs.

[0197] Alternatively, the invention provides for pharmaceutically acceptable nanocapsule formulations of the polynucleotide compositions of the present invention. Nanocapsules can generally entrap compounds in a stable and reproducible way (Henry-Michelland et al., 1987; Quintanar-Guerrero et al., 1998; Douglas et al., 1987). To avoid side effects due to intracellular polymeric overloading, such ultrafine particles (sized around 0.1 μm) should be designed using polymers able to be degraded in vivo. Biodegradable polyalkyl-cyanoacrylate nanoparticles that meet these requirements are contemplated for use in the present invention, and such particles may be are easily made, as described (Couvreur et al., 1980; 1988; zur Muhlen et al., 1998; Zambaux et al. 1998; Pinto-Alphandry et al., 1995 and U.S. Pat. No. 5,145,684, specifically incorporated herein by reference in its entirety). In particular, methods of polynucleotide delivery to a target cell using either nanoparticles or nanospheres (Schwab et al., 1994; Truong-Le et al., 1998) are also particularly contemplated to be useful in formulating the disclosed compositions for administration to an animal, and to a human in particular.

[0198] 4.7 Therapeutic Agents and Kits

[0199] The invention also provides one or more of the hematological malignancy-related compositions formulated with one or more pharmaceutically acceptable excipients, carriers, diluents, adjuvants, and/or other components for use in the preparation of medicaments, or diagnostic reagents, as well as various kits comprising one or more of such compositions, medicaments, or formulations intended for administration to an animal in need thereof, or for use in one or more diagnostic assays for identifying polynucleotides, polypeptides, and/or antibodies that are specific for one or more hematological malignancy-related compounds as described herein. In addition to the disclosed epitopes, antibodies and antigen binding fragments, antibody- or antigen binding fragment-encoding polynucleotides or additional anticancer agents, polynucleotides, peptides, antigens, or other therapeutic compounds as may be employed in the formulation of particular compositions and formulations disclosed herein, and particularly in the preparation of anticancer agents or anti-hematological malignancies therapies for administration to the affected mammal.

[0200] As such, preferred animals for administration of the pharmaceutical compositions disclosed herein include mammals, and particularly humans. Other preferred animals include primates, sheep, goats, bovines, equines, porcines, lupines, canines, and felines, as well as any other mammalian species commonly considered pets, livestock, or commercially relevant animal species. The compositions and formulations may include partially or significantly purified polypeptide, polynucleotide, or antibody or antigen binding fragment compositions, either alone, or in combination with one or more additional active ingredients, anticancer agents, vaccines, adjuvants, or other therapeutics which may be obtained from natural or recombinant sources, or which may be obtainable naturally or either chemically synthesized, or alternatively produced in vitro from recombinant host cells expressing one or more nucleic acid segments that encode one or more such additional active ingredients, carriers, adjuvants, cofactors, or other therapeutic compound.

[0201] 4.8 Diagnostic Reagents and Kits

[0202] The invention further provides diagnostic reagents and kits comprising one or more such reagents for use in a variety of diagnostic assays, including for example, immunoassays such as ELISA and “sandwich”-type immunoassays. Such kits may preferably include at least a first peptide, or a first antibody or antigen binding fragment of the invention, a functional fragment thereof, or a cocktail thereof, and means for signal generation. The kit's components may be pre-attached to a solid support, or may be applied to the surface of a solid support when the kit is used. The signal generating means may come pre-associated with an antibody of the invention or may require combination with one or more components, e.g., buffers, antibody-enzyme conjugates, enzyme substrates, or the like, prior to use. Kits may also include additional reagents, e.g., blocking reagents for reducing nonspecific binding to the solid phase surface, washing reagents, enzyme substrates, and the like. The solid phase surface may be in the form of microtiter plates, microspheres, or other materials suitable for immobilizing proteins, peptides, or polypeptides. Preferably, an enzyme that catalyzes the formation of a chemiluminescent or chromogenic product or the reduction of a chemiluminescent or chromogenic substrate is a component of the signal generating means. Such enzymes are well known in the art.

[0203] Such kits are useful in the detection, monitoring and diagnosis of conditions characterized by over-expression or inappropriate expression of hematological malignancy-related peptides, polypeptides, antibodies, and/or polynucleotides, as well as hybridomas, host cells, and vectors comprising one or more such compositions as disclosed herein.

[0204] The therapeutic and diagnostic kits of the present invention may also be prepared that comprise at least one of the antibody, peptide, antigen binding fragment, hybridoma, vector, vaccine, polynucleotide, or cellular compositions disclosed herein and instructions for using the composition as a diagnostic reagent or therapeutic agent. Containers for use in such kits may typically comprise at least one vial, test tube, flask, bottle, syringe or other suitable container, into which one or more of the diagnostic and/or therapeutic composition(s) may be placed, and preferably suitably aliquoted. Where a second therapeutic agent is also provided, the kit may also contain a second distinct container into which this second diagnostic and/or therapeutic composition may be placed. Alternatively, a plurality of compounds may be prepared in a single pharmaceutical composition, and may be packaged in a single container means, such as a vial, flask, syringe, bottle, or other suitable single container. The kits of the present invention will also typically include a means for containing the vial(s) in close confinement for commercial sale, such as, e.g., injection or blow-molded plastic containers into which the desired vial(s) are retained. Where a radiolabel, chromogenic, fluorigenic, or other type of detectable label or detecting means is included within the kit, the labeling agent may be provided either in the same container as the diagnostic or therapeutic composition itself, or may alternatively be placed in a second distinct container means into which this second composition may be placed and suitably aliquoted. Alternatively, the detection reagent and the label may be prepared in a single container means, and in most cases, the kit will also typically include a means for containing the vial(s) in close confinement for commercial sale and/or convenient packaging and delivery.

[0205] 4.9 Polynucleotide Compositions

[0206] As used herein, the terms “DNA segment” and “polynucleotide” refer to a DNA molecule that has been isolated free of total genomic DNA of a particular species. Therefore, a DNA segment encoding a polypeptide refers to a DNA segment that contains one or more coding sequences yet is substantially isolated away from, or purified free from, total genomic DNA of the species from which the DNA segment is obtained. Included within the terms “DNA segment” and “polynucleotide” are DNA segments and smaller fragments of such segments, and also recombinant vectors, including, for example, plasmids, cosmids, phagemids, phage, viruses, and the like.

[0207] As will be understood by those skilled in the art, the DNA segments of this invention can include genomic sequences, extra-genomic and plasmid-encoded sequences and smaller engineered gene segments that express, or may be adapted to express, proteins, polypeptides, peptides and the like. Such segments may be naturally isolated, or modified synthetically by the hand of man.

[0208] “Isolated,” as used herein, means that a polynucleotide is substantially away from other coding sequences, and that the DNA segment does not contain large portions of unrelated coding DNA, such as large chromosomal fragments or other functional genes or polypeptide coding regions. Of course, this refers to the DNA segment as originally isolated, and does not exclude genes or coding regions later added to the segment by the hand of man.

[0209] As will be recognized by the skilled artisan, polynucleotides may be single-stranded (coding or antisense) or double-stranded, and may be DNA (genomic, cDNA or synthetic) or RNA molecules. RNA molecules include HnRNA molecules, which contain introns and correspond to a DNA molecule in a one-to-one manner, and mRNA molecules, which do not contain introns. Additional coding or non-coding sequences may, but need not, be present within a polynucleotide of the present invention, and a polynucleotide may, but need not, be linked to other molecules and/or support materials.

[0210] Polynucleotides may comprise a native sequence (i.e., an endogenous sequence that encodes a hematological malignancy-related tumor protein or a portion thereof) or may comprise a variant, or a biological or antigenic functional equivalent of such a sequence. Polynucleotide variants may contain one or more substitutions, additions, deletions and/or insertions, as further described below, preferably such that the immunogenicity of the encoded polypeptide is not diminished, relative to a native tumor protein. The effect on the immunogenicity of the encoded polypeptide may generally be assessed as described herein. The term “variants” also encompasses homologous genes of xenogenic origin.

[0211] When comparing polynucleotide or polypeptide sequences, two sequences are said to be “identical” if the sequence of nucleotides or amino acids in the two sequences is the same when aligned for maximum correspondence, as described below. Comparisons between two sequences are typically performed by comparing the sequences over a comparison window to identify and compare local regions of sequence similarity. A “comparison window” as used herein, refers to a segment of at least about 20 contiguous positions, usually 30 to about 75, 40 to about 50, in which a sequence may be compared to a reference sequence of the same number of contiguous positions after the two sequences are optimally aligned.

[0212] Optimal alignment of sequences for comparison may be conducted using the Megalign program in the Lasergene suite of bioinformatics software (DNASTAR, Inc., Madison, Wis.), using default parameters. This program embodies several alignment schemes described in the following references: Dayhoff, M. O. (1978) A model of evolutionary change in proteins—Matrices for detecting distant relationships. In Dayhoff, M. O. (ed.) Atlas of Protein Sequence and Structure, National Biomedical Research Foundation, Washington D.C. Vol. 5, Suppl. 3, pp. 345-358; Hein J. (1990) Unified Approach to Alignment and Phylogenes pp. 626-645 Methods in Enzymology vol. 183, Academic Press, Inc., San Diego, Calif.; Higgins, D. G. and Sharp, P. M. (1989) CABIOS 5:151-153; Myers, E. W. and Muller W. (1988) CABIOS 4:11-17; Robinson, E. D. (1971) Comb. Theor 11:105; Santou, N. Nes, M. (1987) Mol. Biol. Evol. 4:406-425; Sneath, P. H. A. and Sokal, R. R. (1973) Numerical Taxonomy—the Principles and Practice of Numerical Taxonomy, Freeman Press, San Francisco, Calif.; Wilbur, W. J. and Lipman, D. J. (1983) Proc. Natl. Acad., Sci. USA 80:726-730.

[0213] Alternatively, optimal alignment of sequences for comparison may be conducted by the local identity algorithm of Smith and Waterman (1981) Add. APL. Math 2:482, by the identity alignment algorithm of Needleman and Wunsch (1970) J. Mol. Biol. 48:443, by the search for similarity methods of Pearson and Lipman (1988) Proc. Natl. Acad. Sci. USA 85: 2444, by computerized implementations of these algorithms (GAP, BESTFIT, BLAST, FASTA, and TFASTA in the Wisconsin Genetics Software Package, Genetics Computer Group (GCG), 575 Science Dr., Madison, Wis.), or by inspection.

[0214] One preferred example of algorithms that are suitable for determining percent sequence identity and sequence similarity are the BLAST and BLAST 2.0 algorithms, which are described in Altschul et al. (1977) Nucl. Acids Res. 25:3389-3402 and Altschul et al. (1990) J. Mol. Biol. 215:403-410, respectively. BLAST and BLAST 2.0 can be used, for example with the parameters described herein, to determine percent sequence identity for the polynucleotides and polypeptides of the invention. Software for performing BLAST analyses is publicly available through the National Center for Biotechnology Information. In one illustrative example, cumulative scores can be calculated using, for nucleotide sequences, the parameters M (reward score for a pair of matching residues; always >0) and N (penalty score for mismatching residues; always <0). For amino acid sequences, a scoring matrix can be used to calculate the cumulative score. Extension of the word hits in each direction are halted when: the cumulative alignment score falls off by the quantity X from its maximum achieved value; the cumulative score goes to zero or below, due to the accumulation of one or more negative-scoring residue alignments; or the end of either sequence is reached. The BLAST algorithm parameters W, T and X determine the sensitivity and speed of the alignment. The BLASTN program (for nucleotide sequences) uses as defaults a wordlength (W) of 11, and expectation (E) of 10, and the BLOSUM62 scoring matrix (see Henikoff and Henikoff (1989) Proc. Natl. Acad. Sci. USA 89:10915) alignments, (B) of 50, expectation (E) of 10, M=5, N=−4 and a comparison of both strands.

[0215] Preferably, the “percentage of sequence identity” is determined by comparing two optimally aligned sequences over a window of comparison of at least 20 positions, wherein the portion of the polynucleotide or polypeptide sequence in the comparison window may comprise additions or deletions (i.e., gaps) of 20 percent or less, usually 5 to 15 percent, or 10 to 12 percent, as compared to the reference sequences (which does not comprise additions or deletions) for optimal alignment of the two sequences. The percentage is calculated by determining the number of positions at which the identical nucleic acid bases or amino acid residue occurs in both sequences to yield the number of matched positions, dividing the number of matched positions by the total number of positions in the reference sequence (i.e., the window size) and multiplying the results by 100 to yield the percentage of sequence identity.

[0216] Therefore, the present invention encompasses polynucleotide and polypeptide sequences having substantial identity to the sequences disclosed herein, for example those comprising at least 50% sequence identity, preferably at least 55%, 60%, 65%, 70%, 75%, 80%, 85%, 90%, 95%, 96%, 97%, 98%, or 99% or higher, sequence identity compared to a polynucleotide or polypeptide sequence of this invention using the methods described herein, (e.g. BLAST analysis using standard parameters, as described below). One skilled in this art will recognize that these values can be appropriately adjusted to determine corresponding identity of proteins encoded by two nucleotide sequences by taking into account codon degeneracy, amino acid similarity, reading frame positioning and the like.

[0217] In additional embodiments, the present invention provides isolated polynucleotides and polypeptides comprising various lengths of contiguous stretches of sequence identical to or complementary to one or more of the sequences disclosed herein. For example, polynucleotides are provided by this invention that comprise at least about 15, 20, 30, 40, 50, 75, 100, 150, 200, 300, 400, 500 or 1000 or more contiguous nucleotides of one or more of the sequences disclosed herein as well as all intermediate lengths there between. It will be readily understood that “intermediate lengths”, in this context, means any length between the quoted values, such as 16, 17, 18, 19, etc.; 21, 22, 23, etc.; 30, 31, 32, etc.; 50, 51, 52, 53, etc.; 100, 101, 102, 103, etc.; 150, 151, 152, 153, etc.; including all integers through 200-500; 500-1,000, and the like.

[0218] The polynucleotides of the present invention, or fragments thereof, regardless of the length of the coding sequence itself, may be combined with other DNA sequences, such as promoters, polyadenylation signals, additional restriction enzyme sites, multiple cloning sites, other coding segments, and the like, such that their overall length may vary considerably. It is therefore contemplated that a nucleic acid fragment of almost any length may be employed, with the total length preferably being limited by the ease of preparation and use in the intended recombinant DNA protocol. For example, illustrative DNA segments with total lengths of about 10,000, about 5000, about 3000, about 2,000, about 1,000, about 500, about 200, about 100, about 50 base pairs in length, and the like, (including all intermediate lengths) are contemplated to be useful in many implementations of this invention.

[0219] In other embodiments, the present invention is directed to polynucleotides that are capable of hybridizing under moderately stringent conditions to a polynucleotide sequence provided herein, or a fragment thereof, or a complementary sequence thereof. Hybridization techniques are well known in the art of molecular biology. For purposes of illustration, suitable moderately stringent conditions for testing the hybridization of a polynucleotide of this invention with other polynucleotides include prewashing in a solution of 5×SSC, 0.5% SDS, 1.0 mM EDTA (pH 8.0); hybridizing at 50° C.-65° C., 5×SSC, overnight; followed by washing twice at 65° C. for 20 minutes with each of 2×, 0.5× and 0.2×SSC containing 0.1% SDS.

[0220] Moreover, it will be appreciated by those of ordinary skill in the art that, as a result of the degeneracy of the genetic code, there are many nucleotide sequences that encode a polypeptide as described herein. Some of these polynucleotides bear minimal homology to the nucleotide sequence of any native gene. Nonetheless, polynucleotides that vary due to differences in codon usage are specifically contemplated by the present invention. Further, alleles of the genes comprising the polynucleotide sequences provided herein are within the scope of the present invention. Alleles are endogenous genes that are altered as a result of one or more mutations, such as deletions, additions and/or substitutions of nucleotides. The resulting mRNA and protein may, but need not, have an altered structure or function. Alleles may be identified using standard techniques (such as hybridization, amplification and/or database sequence comparison).

[0221] 4.10 Probes and Primers

[0222] In other embodiments of the present invention, the polynucleotide sequences provided herein can be advantageously used as probes or primers for nucleic acid hybridization. As such, it is contemplated that nucleic acid segments that comprise a sequence region of at least about 15, 20, 25, 30, 35, 40, 45, 50, 55, 60, 65, 70, 75, 80, 85, 90, or 95 nucleotide long contiguous sequence that has the same sequence as, or is complementary to, at least a 15, 20, 25, 30, 35, 40, 45, 50, 55, 60, 65, 70, 75, 80, 85, 90, or 95 nucleotide long contiguous sequence the disclosed polynucleotides will find particular utility in a variety of hybridization embodiments. Longer contiguous identical or complementary sequences, e.g., those of about 100, 110, 120, 130, 140, 150, 160, 170, 180, 190, 200, 210, 220, 230, 240, 250, 260, 270, 280, 290, 300, 310, 320, 330, 340, 350, 360, 370, 380, 390, 400, 410, 420, 430, 440, 450, 460, 470, 480, 490, 500, 525, 550, 575, 600, 650, 700, 750, 800, 850, 900, 950, or even 1000 or so nucleotides (including all intermediate lengths) and all full-length sequences as the disclosed polynucleotides will also be of use in certain embodiments as probes, primers, or amplification targets and such like.

[0223] The ability of such nucleic acid probes to specifically hybridize to a sequence of interest will enable them to be of use in detecting the presence of complementary sequences in a given sample. However, other uses are also envisioned, such as the use of the sequence information for the preparation of mutant species primers, or primers, for use in preparing other genetic constructions, and for identifying and characterizing full-length polynucleotides and full, or substantially full-length cDNAs, mRNAs, and such like.

[0224] Polynucleotide molecules having sequence regions consisting of contiguous nucleotide stretches identical or complementary to one or more polynucleotide sequences as disclosed herein, are particularly contemplated as hybridization probes for use in, e.g. Southern hybridization analyses and Northern blotting. This would allow a gene product, or fragment thereof, to be analyzed, both in diverse cell types and also in various bacterial cells. The total size of fragment, as well as the size of the complementary stretch(es), will ultimately depend on the intended use or application of the particular nucleic acid segment. Smaller fragments will generally find use in hybridization embodiments, wherein the length of the contiguous complementary region may be varied, such as between about 15, 20, 25, 30, 35, 40, 45, 50, 55, 60 or so and up to and including larger contiguous complementary sequences, including those of about 70, 80, 90, 100, 120, 140, 160, 180, or 200 or so nucleotides in length may also be used, according to the given desired goal, and the particular length of the complementary sequences one wishes to detect by hybridization analysis.

[0225] The use of a hybridization probe of about between about 20 and about 500 nucleotides in length allows the formation of a duplex molecule that is both stable and selective. Molecules having contiguous complementary sequences over stretches greater than about 20 or so bases in length are generally preferred, though, in order to increase stability and selectivity of the hybrid, and thereby improve the quality and degree of specific hybrid molecules obtained. One will generally prefer to design nucleic acid molecules having gene-complementary stretches of between about 25 and 300 or so contiguous nucleotides, or even longer where desired.

[0226] Hybridization probes may be selected from any portion of any of the sequences disclosed herein. All that is required is to review the disclosed sequences, or to any contiguous portion of such a sequence, from about 15 to 30 nucleotides in length up to and including the full length sequence, that one wishes to utilize as a probe or primer. The choice of probe and primer sequences may be governed by various factors. For example, one may wish to employ primers from towards the termini of the total sequence.

[0227] Small polynucleotide segments or fragments may be readily prepared by, for example, directly synthesizing the fragment by chemical means, as is commonly practiced using an automated oligonucleotide synthesizer. Also, fragments may be obtained by application of nucleic acid reproduction technology, such as the PCR™ technology of U.S. Pat. No. 4,683,202 (incorporated herein by reference), by introducing selected sequences into recombinant vectors for recombinant production, and by other recombinant DNA techniques generally known to those of skill in the art of molecular biology.

[0228] The nucleotide sequences of the invention may be used for their ability to selectively form duplex molecules with complementary stretches of the entire gene or gene fragments of interest. Depending on the application envisioned, one will typically desire to employ varying conditions of hybridization to achieve varying degrees of selectivity of probe towards target sequence. For applications requiring high selectivity, one will typically desire to employ relatively stringent conditions to form the hybrids, e.g., one will select relatively low salt and/or high temperature conditions, such as provided by a salt concentration of from about 0.02 M to about 0.15 M salt at temperatures of from about 50° C. to about 70° C. Such selective conditions tolerate little, if any, mismatch between the probe and the template or target strand, and would be particularly suitable for isolating related sequences.

[0229] Of course, for some applications, for example, where one desires to prepare mutants employing a mutant primer strand hybridized to an underlying template, less stringent (reduced stringency) hybridization conditions will typically be needed in order to allow formation of the heteroduplex. In these circumstances, one may desire to employ salt conditions such as those of from about 0.15 M to about 0.9 M salt, at temperatures ranging from about 20° C. to about 55° C. Cross-hybridizing species can thereby be readily identified as positively hybridizing signals with respect to control hybridizations. In any case, it is generally appreciated that conditions can be rendered more stringent by the addition of increasing amounts of formamide, which serves to destabilize the hybrid duplex in the same manner as increased temperature. Thus, hybridization conditions can be readily manipulated, and thus will generally be a method of choice depending on the desired results.

[0230] 4.11 Polynucleotide Identification and Characterization

[0231] Polynucleotides may be identified, prepared and/or manipulated using any of a variety of well established techniques. For example, a polynucleotide may be identified, as described in more detail below, by screening a microarray of cDNAs for tumor-associated expression (i.e., expression that is at least two fold greater in a tumor than in normal tissue, as determined using a representative assay provided herein). Such screens may be performed, for example, using a Synteni microarray (Palo Alto, Calif.) according to the manufacturer's instructions (and essentially as described by Schena et al., Proc. Natl. Acad. Sci. USA 93:10614-10619, 1996 and Heller et al., Proc. Natl. Acad. Sci. USA 94:2150-2155, 1997). Alternatively, polynucleotides may be amplified from cDNA prepared from cells expressing the proteins described herein, such as hematological malignancy-related tumor cells. Such polynucleotides may be amplified via polymerase chain reaction (PCR). For this approach, sequence-specific primers may be designed based on the sequences provided herein, and may be purchased or synthesized.

[0232] An amplified portion of a polynucleotide of the present invention may be used to isolate a full length gene from a suitable library (e.g., a hematological malignancy-related tumor cDNA library) using well known techniques. Within such techniques, a library (cDNA or genomic) is screened using one or more polynucleotide probes or primers suitable for amplification. Preferably, a library is size-selected to include larger molecules. Random primed libraries may also be preferred for identifying 5′ and upstream regions of genes. Genomic libraries are preferred for obtaining introns and extending 5′ sequences.

[0233] For hybridization techniques, a partial sequence may be labeled (e.g., by nick-translation or end-labeling with ³²P) using well known techniques. A bacterial or bacteriophage library is then generally screened by hybridizing filters containing denatured bacterial colonies (or lawns containing phage plaques) with the labeled probe (see Sambrook et al., Molecular Cloning: A Laboratory Manual, Cold Spring Harbor Laboratories, Cold Spring Harbor, N.Y., 1989). Hybridizing colonies or plaques are selected and expanded, and the DNA is isolated for further analysis. cDNA clones may be analyzed to determine the amount of additional sequence by, for example, PCR using a primer from the partial sequence and a primer from the vector. Restriction maps and partial sequences may be generated to identify one or more overlapping clones. The complete sequence may then be determined using standard techniques, which may involve generating a series of deletion clones. The resulting overlapping sequences can then assembled into a single contiguous sequence. A full length cDNA molecule can be generated by ligating suitable fragments, using well known techniques.

[0234] Alternatively, there are numerous amplification techniques for obtaining a full length coding sequence from a partial cDNA sequence. Within such techniques, amplification is generally performed via PCR. Any of a variety of commercially available kits may be used to perform the amplification step. Primers may be designed using, for example, software or algorithms or formulas well known in the art.

[0235] One such amplification technique is inverse PCR (see Triglia et al., Nucl. Acids Res. 16:8186, 1988), which uses restriction enzymes to generate a fragment in the known region of the gene. The fragment is then circularized by intramolecular ligation and used as a template for PCR with divergent primers derived from the known region. Within an alternative approach, sequences adjacent to a partial sequence may be retrieved by amplification with a primer to a linker sequence and a primer specific to a known region. The amplified sequences are typically subjected to a second round of amplification with the same linker primer and a second primer specific to the known region. A variation on this procedure, which employs two primers that initiate extension in opposite directions from the known sequence, is described in WO 96/38591. Another such technique is known as “rapid amplification of cDNA ends” or RACE. This technique involves the use of an internal primer and an external primer, which hybridizes to a polyA region or vector sequence, to identify sequences that are 5′ and 3′ of a known sequence. Additional techniques include capture PCR (Lagerstrom et al., PCR Methods Applic. 1:111-19, 1991) and walking PCR (Parker et al., Nucl. Acids. Res. 19:3055-60, 1991). Other methods employing amplification may also be employed to obtain a full length cDNA sequence.

[0236] In certain instances, it is possible to obtain a full length cDNA sequence by analysis of sequences provided in an expressed sequence tag (EST) database, such as that available from GenBank. Searches for overlapping ESTs may generally be performed using well known programs (e.g., NCBI BLAST searches), and such ESTs may be used to generate a contiguous full length sequence. Full length DNA sequences may also be obtained by analysis of genomic fragments.

[0237] 4.12 Polynucleotide Expression in Host Cells

[0238] In other embodiments of the invention, polynucleotide sequences or fragments thereof which encode polypeptides of the invention, or fusion proteins or functional equivalents thereof, may be used in recombinant DNA molecules to direct expression of a polypeptide in appropriate host cells. Due to the inherent degeneracy of the genetic code, other DNA sequences that encode substantially the same or a functionally equivalent amino acid sequence may be produced and these sequences may be used to clone and express a given polypeptide.

[0239] As will be understood by those of skill in the art, it may be advantageous in some instances to produce polypeptide-encoding nucleotide sequences possessing non-naturally occurring codons. For example, codons preferred by a particular prokaryotic or eukaryotic host can be selected to increase the rate of protein expression or to produce a recombinant RNA transcript having desirable properties, such as a half-life which is longer than that of a transcript generated from the naturally occurring sequence.

[0240] Moreover, the polynucleotide sequences of the present invention can be engineered using methods generally known in the art in order to alter polypeptide encoding sequences for a variety of reasons, including but not limited to, alterations which modify the cloning, processing, and/or expression of the gene product. For example, DNA shuffling by random fragmentation and PCR reassembly of gene fragments and synthetic oligonucleotides may be used to engineer the nucleotide sequences. In addition, site-directed mutagenesis may be used to insert new restriction sites, alter glycosylation patterns, change codon preference, produce splice variants, or introduce mutations, and so forth.

[0241] In another embodiment of the invention, natural, modified, or recombinant nucleic acid sequences may be ligated to a heterologous sequence to encode a fusion protein. For example, to screen peptide libraries for inhibitors of polypeptide activity, it may be useful to encode a chimeric protein that can be recognized by a commercially available antibody. A fusion protein may also be engineered to contain a cleavage site located between the polypeptide-encoding sequence and the heterologous protein sequence, so that the polypeptide may be cleaved and purified away from the heterologous moiety.

[0242] Sequences encoding a desired polypeptide may be synthesized, in whole or in part, using chemical methods well known in the art (see Caruthers, M. H. et al. (1980) Nucl. Acids Res. Symp. Ser. 215-223, Horn, T. et al. (1980) Nucl. Acids Res. Symp. Ser. 225-232). Alternatively, the protein itself may be produced using chemical methods to synthesize the amino acid sequence of a polypeptide, or a portion thereof. For example, peptide synthesis can be performed using various solid-phase techniques (Roberge, J. Y. et al. (1995) Science 269:202-204) and automated synthesis may be achieved, for example, using the ABI 431A Peptide Synthesizer (Perkin Elmer, Palo Alto, Calif.).

[0243] A newly synthesized peptide may be substantially purified by preparative high performance liquid chromatography (e.g., Creighton, T. (1983) Proteins, Structures and Molecular Principles, WH Freeman and Co., New York, N.Y.) or other comparable techniques available in the art. The composition of the synthetic peptides may be confirmed by amino acid analysis or sequencing (e.g., the Edman degradation procedure). Additionally, the amino acid sequence of a polypeptide, or any part thereof, may be altered during direct synthesis and/or combined using chemical methods with sequences from other proteins, or any part thereof, to produce a variant polypeptide.

[0244] In order to express a desired polypeptide, the nucleotide sequences encoding the polypeptide, or functional equivalents, may be inserted into appropriate expression vector, i.e., a vector which contains the necessary elements for the transcription and translation of the inserted coding sequence. Methods which are well known to those skilled in the art may be used to construct expression vectors containing sequences encoding a polypeptide of interest and appropriate transcriptional and translational control elements. These methods include in vitro recombinant DNA techniques, synthetic techniques, and in vivo genetic recombination. Such techniques are described in Sambrook, J. et al. (1989) Molecular Cloning, A Laboratory Manual, Cold Spring Harbor Press, Plainview, N.Y., and Ausubel, F. M. et al. (1989) Current Protocols in Molecular Biology, John Wiley & Sons, New York. N.Y.

[0245] A variety of expression vector/host systems may be utilized to contain and express polynucleotide sequences. These include, but are not limited to, microorganisms such as bacteria transformed with recombinant bacteriophage, plasmid, or cosmid DNA expression vectors; yeast transformed with yeast expression vectors; insect cell systems infected with virus expression vectors (e.g., baculovirus); plant cell systems transformed with virus expression vectors (e.g., cauliflower mosaic virus, CaMV; tobacco mosaic virus, TMV) or with bacterial expression vectors (e.g., Ti or pBR322 plasmids); or animal cell systems.

[0246] The “control elements” or “regulatory sequences” present in an expression vector are those non-translated regions of the vector—enhancers, promoters, 5′ and 3′ untranslated regions—which interact with host cellular proteins to carry out transcription and translation. Such elements may vary in their strength and specificity. Depending on the vector system and host utilized, any number of suitable transcription and translation elements, including constitutive and inducible promoters, may be used. For example, when cloning in bacterial systems, inducible promoters such as the hybrid lacZ promoter of the PBLUESCRIPT phagemid (Stratagene, La Jolla, Calif.) or PSPORT1 plasmid (Gibco BRL, Gaithersburg, Md.) and the like may be used. In mammalian cell systems, promoters from mammalian genes or from mammalian viruses are generally preferred. If it is necessary to generate a cell line that contains multiple copies of the sequence encoding a polypeptide, vectors based on SV40 or EBV may be advantageously used with an appropriate selectable marker.

[0247] In bacterial systems, a number of expression vectors may be selected depending upon the use intended for the expressed polypeptide. For example, when large quantities are needed, for example for the induction of antibodies, vectors which direct high level expression of fusion proteins that are readily purified may be used. Such vectors include, but are not limited to, the multifunctional E. coli cloning and expression vectors such as BLUESCRIPT (Stratagene), in which the sequence encoding the polypeptide of interest may be ligated into the vector in frame with sequences for the amino-terminal Met and the subsequent 7 residues of .beta.-galactosidase so that a hybrid protein is produced; pIN vectors (Van Heeke, G. and S. M. Schuster (1989) J. Biol. Chem. 264:5503-5509); and the like. pGEX Vectors (Promega, Madison, Wis.) may also be used to express foreign polypeptides as fusion proteins with glutathione S-transferase (GST). In general, such fusion proteins are soluble and can easily be purified from lysed cells by adsorption to glutathione-agarose beads followed by elution in the presence of free glutathione. Proteins made in such systems may be designed to include heparin, thrombin, or factor XA protease cleavage sites so that the cloned polypeptide of interest can be released from the GST moiety at will.

[0248] In the yeast, Saccharomyces cerevisiae, a number of vectors containing constitutive or inducible promoters such as alpha factor, alcohol oxidase, and PGH may be used. For reviews, see Ausubel et al. (supra) and Grant et al. (1987) Methods Enzymol. 153:516-544.

[0249] In cases where plant expression vectors are used, the expression of sequences encoding polypeptides may be driven by any of a number of promoters. For example, viral promoters such as the 35S and 19S promoters of CaMV may be used alone or in combination with the omega leader sequence from TMV (Takamatsu, N. (1987) EMBO J. 6:307-311. Alternatively, plant promoters such as the small subunit of RUBISCO or heat shock promoters may be used (Coruzzi, G. et al. (1984) EMBO J. 3:1671-1680; Broglie, R. et al. (1984) Science 224:838-843; and Winter, J. et al. (1991) Results Probl. Cell Differ. 17:85-105). These constructs can be introduced into plant cells by direct DNA transformation or pathogen-mediated transfection. Such techniques are described in a number of generally available reviews (see, for example, Hobbs, S. or Murry, L. E. in McGraw Hill Yearbook of Science and Technology (1992) McGraw Hill, New York, N.Y.; pp. 191-196).

[0250] An insect system may also be used to express a polypeptide of interest. For example, in one such system, Autographa californica nuclear polyhedrosis virus (AcNPV) is used as a vector to express foreign genes in Spodoptera frugiperda cells or in Trichoplusia larvae. The sequences encoding the polypeptide may be cloned into a non-essential region of the virus, such as the polyhedrin gene, and placed under control of the polyhedrin promoter. Successful insertion of the polypeptide-encoding sequence will render the polyhedrin gene inactive and produce recombinant virus lacking coat protein. The recombinant viruses may then be used to infect, for example, S. frugiperda cells or Trichoplusia larvae in which the polypeptide of interest may be expressed (Engelhard, E. K. et al. (1994) Proc. Natl. Acad. Sci 91:3224-3227).

[0251] In mammalian host cells, a number of viral-based expression systems are generally available. For example, in cases where an adenovirus is used as an expression vector, sequences encoding a polypeptide of interest may be ligated into an adenovirus transcription/translation complex consisting of the late promoter and tripartite leader sequence. Insertion in a non-essential E1 or E3 region of the viral genome may be used to obtain a viable virus which is capable of expressing the polypeptide in infected host cells (Logan, J. and Shenk, T. (1984) Proc. Natl. Acad. Sci. 81:3655-3659). In addition, transcription enhancers, such as the Rous sarcoma virus (RSV) enhancer, may be used to increase expression in mammalian host cells.

[0252] Specific initiation signals may also be used to achieve more efficient translation of sequences encoding a polypeptide of interest. Such signals include the ATG initiation codon and adjacent sequences. In cases where sequences encoding the polypeptide, its initiation codon, and upstream sequences are inserted into the appropriate expression vector, no additional transcriptional or translational control signals may be needed. However, in cases where only coding sequence, or a portion thereof, is inserted, exogenous translational control signals including the ATG initiation codon should be provided. Furthermore, the initiation codon should be in the correct reading frame to ensure translation of the entire insert. Exogenous translational elements and initiation codons may be of various origins, both natural and synthetic. The efficiency of expression may be enhanced by the inclusion of enhancers which are appropriate for the particular cell system which is used, such as those described in the literature (Scharf, D. et al. (1994) Results Probl. Cell Differ. 20:125-162).

[0253] In addition, a host cell strain may be chosen for its ability to modulate the expression of the inserted sequences or to process the expressed protein in the desired fashion. Such modifications of the polypeptide include, but are not limited to, acetylation, carboxylation, glycosylation, phosphorylation, lipidation, and acylation. Post-translational processing which cleaves a “prepro” form of the protein may also be used to facilitate correct insertion, folding and/or function. Different host cells such as CHO, HeLa, MDCK, HEK293, and WI38, which have specific cellular machinery and characteristic mechanisms for such post-translational activities, may be chosen to ensure the correct modification and processing of the foreign protein.

[0254] For long-term, high-yield production of recombinant proteins, stable expression is generally preferred. For example, cell lines which stably express a polynucleotide of interest may be transformed using expression vectors which may contain viral origins of replication and/or endogenous expression elements and a selectable marker gene on the same or on a separate vector. Following the introduction of the vector, cells may be allowed to grow for 1-2 days in an enriched media before they are switched to selective media. The purpose of the selectable marker is to confer resistance to selection, and its presence allows growth and recovery of cells which successfully express the introduced sequences. Resistant clones of stably transformed cells may be proliferated using tissue culture techniques appropriate to the cell type.

[0255] Any number of selection systems may be used to recover transformed cell lines. These include, but are not limited to, the herpes simplex virus thymidine kinase (Wigler, M. et al. (1977) Cell 11:223-32) and adenine phosphoribosyltransferase (Lowy, I. et al (1990) Cell 22:817-23) genes which can be employed in tk.sup.− or aprt.sup.− cells, respectively. Also, antimetabolite, antibiotic or herbicide resistance can be used as the basis for selection; for example, dhfr which confers resistance to methotrexate (Wigler, M. et al. (1980) Proc. Natl. Acad. Sci. 77:3567-70); npt, which confers resistance to the aminoglycosides, neomycin and G-418 (Colbere-Garapin, F. et al (1981) J. Mol. Biol. 150:1-14); and als or pat, which confer resistance to chlorsulfuron and phosphinotricin acetyltransferase, respectively (Murry, supra). Additional selectable genes have been described, for example, trpB, which allows cells to utilize indole in place of tryptophan, or hisD, which allows cells to utilize histinol in place of histidine (Hartman, S. C. and R. C. Mulligan (1988) Proc. Natl. Acad. Sci. 85:8047-51). Recently, the use of visible markers has gained popularity with such markers as anthocyanins, beta-glucuronidase and its substrate GUS, and luciferase and its substrate luciferin, being widely used not only to identify transformants, but also to quantify the amount of transient or stable protein expression attributable to a specific vector system (Rhodes, C. A. et al. (1995) Methods Mol. Biol. 55:121-131).

[0256] Although the presence/absence of marker gene expression suggests that the gene of interest is also present, its presence and expression may need to be confirmed. For example, if the sequence encoding a polypeptide is inserted within a marker gene sequence, recombinant cells containing sequences can be identified by the absence of marker gene function. Alternatively, a marker gene can be placed in tandem with a polypeptide-encoding sequence under the control of a single promoter. Expression of the marker gene in response to induction or selection usually indicates expression of the tandem gene as well.

[0257] Alternatively, host cells which contain and express a desired polynucleotide sequence may be identified by a variety of procedures known to those of skill in the art. These procedures include, but are not limited to, DNA-DNA or DNA-RNA hybridizations and protein bioassay or immunoassay techniques which include membrane, solution, or chip based technologies for the detection and/or quantification of nucleic acid or protein.

[0258] A variety of protocols for detecting and measuring the expression of polynucleotide-encoded products, using either polyclonal or monoclonal antibodies specific for the product are known in the art. Examples include enzyme-linked immunosorbent assay (ELISA), radioimmunoassay (RIA), and fluorescence activated cell sorting (FACS). A two-site, monoclonal-based immunoassay utilizing monoclonal antibodies reactive to two non-interfering epitopes on a given polypeptide may be preferred for some applications, but a competitive binding assay may also be employed. These and other assays are described, among other places, in Hampton, R. et al. (1990; Serological Methods, a Laboratory Manual, APS Press, St Paul. Minn.) and Maddox, D. E. et al. (1983; J. Exp. Med. 158:1211-1216).

[0259] A wide variety of labels and conjugation techniques are known by those skilled in the art and may be used in various nucleic acid and amino acid assays. Means for producing labeled hybridization or PCR probes for detecting sequences related to polynucleotides include oligolabeling, nick translation, end-labeling or PCR amplification using a labeled nucleotide. Alternatively, the sequences, or any portions thereof may be cloned into a vector for the production of an mRNA probe. Such vectors are known in the art, are commercially available, and may be used to synthesize RNA probes in vitro by addition of an appropriate RNA polymerase such as T7, T3, or SP6 and labeled nucleotides. These procedures may be conducted using a variety of commercially available kits. Suitable reporter molecules or labels, which may be used include radionuclides, enzymes, fluorescent, chemiluminescent, or chromogenic agents as well as substrates, cofactors, inhibitors, magnetic particles, and the like.

[0260] Host cells transformed with a polynucleotide sequence of interest may be cultured under conditions suitable for the expression and recovery of the protein from cell culture. The protein produced by a recombinant cell may be secreted or contained intracellularly depending on the sequence and/or the vector used. As will be understood by those of skill in the art, expression vectors containing polynucleotides of the invention may be designed to contain signal sequences which direct secretion of the encoded polypeptide through a prokaryotic or eukaryotic cell membrane. Other recombinant constructions may be used to join sequences encoding a polypeptide of interest to nucleotide sequence encoding a polypeptide domain which will facilitate purification of soluble proteins. Such purification facilitating domains include, but are not limited to, metal chelating peptides such as histidine-tryptophan modules that allow purification on immobilized metals, protein A domains that allow purification on immobilized immunoglobulin, and the domain utilized in the FLAGS extension/affinity purification system (Immunex Corp., Seattle, Wash.). The inclusion of cleavable linker sequences such as those specific for Factor XA or enterokinase (Invitrogen. San Diego, Calif.) between the purification domain and the encoded polypeptide may be used to facilitate purification. One such expression vector provides for expression of a fusion protein containing a polypeptide of interest and a nucleic acid encoding 6 histidine residues preceding a thioredoxin or an enterokinase cleavage site. The histidine residues facilitate purification on IMIAC (immobilized metal ion affinity chromatography) as described in Porath, J. et al. (1992, Prot. Exp. Purif. 3:263-281) while the enterokinase cleavage site provides a means for purifying the desired polypeptide from the fusion protein. A discussion of vectors which contain fusion proteins is provided in Kroll, D. J. et al. (1993; DNA Cell Biol. 12:441-453).

[0261] In addition to recombinant production methods, polypeptides of the invention, and fragments thereof, may be produced by direct peptide synthesis using solid-phase techniques (Merrifield J. (1963) J. Am. Chem. Soc. 85:2149-2154). Protein synthesis may be performed using manual techniques or by automation. Automated synthesis may be achieved, for example, using Applied Biosystems 431A Peptide Synthesizer (Perkin Elmer). Alternatively, various fragments may be chemically synthesized separately and combined using chemical methods to produce the full length molecule.

[0262] 4.13 Site-Specific Mutagenesis

[0263] Site-specific mutagenesis is a technique useful in the preparation of individual peptides, or biologically functional equivalent polypeptides, through specific mutagenesis of the underlying polynucleotides that encode them. The technique, well-known to those of skill in the art, further provides a ready ability to prepare and test sequence variants, for example, incorporating one or more of the foregoing considerations, by introducing one or more nucleotide sequence changes into the DNA. Site-specific mutagenesis allows the production of mutants through the use of specific oligonucleotide sequences which encode the DNA sequence of the desired mutation, as well as a sufficient number of adjacent nucleotides, to provide a primer sequence of sufficient size and sequence complexity to form a stable duplex on both sides of the deletion junction being traversed. Mutations may be employed in a selected polynucleotide sequence to improve, alter, decrease, modify, or otherwise change the properties of the polynucleotide itself, and/or alter the properties, activity, composition, stability, or primary sequence of the encoded polypeptide.

[0264] In certain embodiments of the present invention, the inventors contemplate the mutagenesis of the disclosed polynucleotide sequences to alter one or more properties of the encoded polypeptide, such as the antigenicity of a polypeptide vaccine. The techniques of site-specific mutagenesis are well-known in the art, and are widely used to create variants of both polypeptides and polynucleotides. For example, site-specific mutagenesis is often used to alter a specific portion of a DNA molecule. In such embodiments, a primer comprising typically about 14 to about 25 nucleotides or so in length is employed, with about 5 to about 10 residues on both sides of the junction of the sequence being altered.

[0265] As will be appreciated by those of skill in the art, site-specific mutagenesis techniques have often employed a phage vector that exists in both a single stranded and double stranded form. Typical vectors useful in site-directed mutagenesis include vectors such as the M13 phage. These phage are readily commercially-available and their use is generally well-known to those skilled in the art. Double-stranded plasmids are also routinely employed in site directed mutagenesis that eliminates the step of transferring the gene of interest from a plasmid to a phage.

[0266] In general, site-directed mutagenesis in accordance herewith is performed by first obtaining a single-stranded vector or melting apart of two strands of a double-stranded vector that includes within its sequence a DNA sequence that encodes the desired peptide. An oligonucleotide primer bearing the desired mutated sequence is prepared, generally synthetically. This primer is then annealed with the single-stranded vector, and subjected to DNA polymerizing enzymes such as E. coli polymerase I Klenow fragment, in order to complete the synthesis of the mutation-bearing strand. Thus, a heteroduplex is formed wherein one strand encodes the original non-mutated sequence and the second strand bears the desired mutation. This heteroduplex vector is then used to transform appropriate cells, such as E. coli cells, and clones are selected which include recombinant vectors bearing the mutated sequence arrangement.

[0267] The preparation of sequence variants of the selected peptide-encoding DNA segments using site-directed mutagenesis provides a means of producing potentially useful species and is not meant to be limiting as there are other ways in which sequence variants of peptides and the DNA sequences encoding them may be obtained. For example, recombinant vectors encoding the desired peptide sequence may be treated with mutagenic agents, such as hydroxylamine, to obtain sequence variants. Specific details regarding these methods and protocols are found in the teachings of Maloy et al., 1994; Segal, 1976; Prokop and Bajpai, 1991; Kuby, 1994; and Maniatis et al., 1982, each incorporated herein by reference, for that purpose.

[0268] As used herein, the term “oligonucleotide directed mutagenesis procedure” refers to template-dependent processes and vector-mediated propagation which result in an increase in the concentration of a specific nucleic acid molecule relative to its initial concentration, or in an increase in the concentration of a detectable signal, such as amplification. As used herein, the term “oligonucleotide directed mutagenesis procedure” is intended to refer to a process that involves the template-dependent extension of a primer molecule. The term template dependent process refers to nucleic acid synthesis of an RNA or a DNA molecule wherein the sequence of the newly synthesized strand of nucleic acid is dictated by the well-known rules of complementary base pairing (see, for example, Watson, 1987). Typically, vector mediated methodologies involve the introduction of the nucleic acid fragment into a DNA or RNA vector, the clonal amplification of the vector, and the recovery of the amplified nucleic acid fragment. Examples of such methodologies are provided by U.S. Pat. No. 4,237,224, specifically incorporated herein by reference in its entirety.

[0269] 4.14 Polynucleotide Amplification Techniques

[0270] A number of template dependent processes are available to amplify the target sequences of interest present in a sample. One of the best known amplification methods is the polymerase chain reaction (PCR™) which is described in detail in U.S. Pat. Nos. 4,683,195, 4,683,202 and 4,800,159, each of which is incorporated herein by reference in its entirety. Briefly, in PCR™, two primer sequences are prepared which are complementary to regions on opposite complementary strands of the target sequence. An excess of deoxynucleoside triphosphates is added to a reaction mixture along with a DNA polymerase (e.g., Taq polymerase). If the target sequence is present in a sample, the primers will bind to the target and the polymerase will cause the primers to be extended along the target sequence by adding on nucleotides. By raising and lowering the temperature of the reaction mixture, the extended primers will dissociate from the target to form reaction products, excess primers will bind to the target and to the reaction product and the process is repeated. Preferably reverse transcription and PCR™ amplification procedure may be performed in order to quantify the amount of mRNA amplified. Polymerase chain reaction methodologies are well known in the art.

[0271] Another method for amplification is the ligase chain reaction (referred to as LCR), disclosed in Eur. Pat. Appl. Publ. No. 320,308 (specifically incorporated herein by reference in its entirety). In LCR, two complementary probe pairs are prepared, and in the presence of the target sequence, each pair will bind to opposite complementary strands of the target such that they abut. In the presence of a ligase, the two probe pairs will link to form a single unit. By temperature cycling, as in PCR™, bound ligated units dissociate from the target and then serve as “target sequences” for ligation of excess probe pairs. U.S. Pat. No. 4,883,750, incorporated herein by reference in its entirety, describes an alternative method of amplification similar to LCR for binding probe pairs to a target sequence.

[0272] Qbeta Replicase, described in PCT Intl. Pat. Appl. Publ. No. PCT/US87/00880, incorporated herein by reference in its entirety, may also be used as still another amplification method in the present invention. In this method, a replicative sequence of RNA that has a region complementary to that of a target is added to a sample in the presence of an RNA polymerase. The polymerase will copy the replicative sequence that can then be detected.

[0273] An isothermal amplification method, in which restriction endonucleases and ligases are used to achieve the amplification of target molecules that contain nucleotide 5′-[α-thio]triphosphates in one strand of a restriction site (Walker et al., 1992, incorporated herein by reference in its entirety), may also be useful in the amplification of nucleic acids in the present invention.

[0274] Strand Displacement Amplification (SDA) is another method of carrying out isothermal amplification of nucleic acids which involves multiple rounds of strand displacement and synthesis, i.e. nick translation. A similar method, called Repair Chain Reaction (RCR) is another method of amplification which may be useful in the present invention and is involves annealing several probes throughout a region targeted for amplification, followed by a repair reaction in which only two of the four bases are present. The other two bases can be added as biotinylated derivatives for easy detection. A similar approach is used in SDA.

[0275] Sequences can also be detected using a cyclic probe reaction (CPR). In CPR, a probe having a 3′ and 5′ sequences of non-target DNA and an internal or “middle” sequence of the target protein specific RNA is hybridized to DNA which is present in a sample. Upon hybridization, the reaction is treated with RNaseH, and the products of the probe are identified as distinctive products by generating a signal that is released after digestion. The original template is annealed to another cycling probe and the reaction is repeated. Thus, CPR involves amplifying a signal generated by hybridization of a probe to a target gene specific expressed nucleic acid.

[0276] Still other amplification methods described in Great Britain Pat. Appl. No. 2 202 328, and in PCT Intl. Pat. Appl. Publ. No. PCT/US89/01025, each of which is incorporated herein by reference in its entirety, may be used in accordance with the present invention. In the former application, “modified” primers are used in a PCR-like, template and enzyme dependent synthesis. The primers may be modified by labeling with a capture moiety (e.g. biotin) and/or a detector moiety (e.g., enzyme). In the latter application, an excess of labeled probes is added to a sample. In the presence of the target sequence, the probe binds and is cleaved catalytically. After cleavage, the target sequence is released intact to be bound by excess probe. Cleavage of the labeled probe signals the presence of the target sequence.

[0277] Other nucleic acid amplification procedures include transcription-based amplification systems (TAS) (Kwoh et al., 1989; PCT Intl. Pat. Appl. Publ. No. WO 88/10315, incorporated herein by reference in its entirety), including nucleic acid sequence based amplification (NASBA) and 3SR. In NASBA, the nucleic acids can be prepared for amplification by standard phenol/chloroform extraction, heat denaturation of a sample, treatment with lysis buffer and minispin columns for isolation of DNA and RNA or guanidinium chloride extraction of RNA. These amplification techniques involve annealing a primer that has sequences specific to the target sequence. Following polymerization, DNA/RNA hybrids are digested with RNase H while double stranded DNA molecules are heat-denatured again. In either case the single stranded DNA is made fully double stranded by addition of second target-specific primer, followed by polymerization. The double stranded DNA molecules are then multiply transcribed by a polymerase such as T7 or SP6. In an isothermal cyclic reaction, the RNAs are reverse transcribed into DNA, and transcribed once again with a polymerase such as T7 or SP6. The resulting products, whether truncated or complete, indicate target-specific sequences.

[0278] Eur. Pat. Appl. Publ. No. 329,822, incorporated herein by reference in its entirety, disclose a nucleic acid amplification process involving cyclically synthesizing single-stranded RNA (“ssRNA”), ssDNA, and double-stranded DNA (dsDNA), which may be used in accordance with the present invention. The ssRNA is a first template for a first primer oligonucleotide, which is elongated by reverse transcriptase (RNA-dependent DNA polymerase). The RNA is then removed from resulting DNA:RNA duplex by the action of ribonuclease H(RNase H, an RNase specific for RNA in a duplex with either DNA or RNA). The resultant ssDNA is a second template for a second primer, which also includes the sequences of an RNA polymerase promoter (exemplified by T7 RNA polymerase) 5′ to its homology to its template. This primer is then extended by DNA polymerase (exemplified by the large “Klenow” fragment of E. coli DNA polymerase I), resulting as a double-stranded DNA (“dsDNA”) molecule, having a sequence identical to that of the original RNA between the primers and having additionally, at one end, a promoter sequence. This promoter sequence can be used by the appropriate RNA polymerase to make many RNA copies of the DNA. These copies can then re-enter the cycle leading to very swift amplification. With proper choice of enzymes, this amplification can be done isothermally without addition of enzymes at each cycle. Because of the cyclical name of this process, the starting sequence can be chosen to be in the form of either DNA or RNA.

[0279] PCT Intl. Pat. Appl. Publ. No. WO 89/06700, incorporated herein by reference in its entirety, disclose a nucleic acid sequence amplification scheme based on the hybridization of a promoter/primer sequence to a target single-stranded DNA (“ssDNA”) followed by transcription of many RNA copies of the sequence. This scheme is not cyclic; i.e. new templates are not produced from the resultant RNA transcripts. Other amplification methods include “RACE” (Frohman, 1990), and “one-sided PCR” (Ohara, 1989) which are well-known to those of skill in the art.

[0280] Methods based on ligation of two (or more) oligonucleotides in the presence of nucleic acid having the sequence of the resulting “di-oligonucleotide”, thereby amplifying the di-oligonucleotide (Wu and Dean, 1996, incorporated herein by reference in its entirety), may also be used in the amplification of DNA sequences of the present invention.

[0281] 4.15 In Vivo Polynucleotide Delivery Techniques

[0282] In additional embodiments, genetic constructs comprising one or more of the polynucleotides of the invention are introduced into cells in vivo. This may be achieved using any of a variety or well known approaches, several of which are outlined below for the purpose of illustration.

[0283] 4.15.1 Adenovirus

[0284] One of the preferred methods for in vivo delivery of one or more nucleic acid sequences involves the use of an adenovirus expression vector. “Adenovirus expression vector” is meant to include those constructs containing adenovirus sequences sufficient to (a) support packaging of the construct and (b) to express a polynucleotide that has been cloned therein in a sense or antisense orientation. Of course, in the context of an antisense construct, expression does not require that the gene product be synthesized.

[0285] The expression vector comprises a genetically engineered form of an adenovirus. Knowledge of the genetic organization of adenovirus, a 36 kb, linear, double-stranded DNA virus, allows substitution of large pieces of adenoviral DNA with foreign sequences up to 7 kb (Grunhaus and Horwitz, 1992). In contrast to retrovirus, the adenoviral infection of host cells does not result in chromosomal integration because adenoviral DNA can replicate in an episomal manner without potential genotoxicity. Also, adenoviruses are structurally stable, and no genome rearrangement has been detected after extensive amplification. Adenovirus can infect virtually all epithelial cells regardless of their cell cycle stage. So far, adenoviral infection appears to be linked only to mild disease such as acute respiratory disease in humans.

[0286] Adenovirus is particularly suitable for use as a gene transfer vector because of its mid-sized genome, ease of manipulation, high titer, wide target-cell range and high infectivity. Both ends of the viral genome contain 100-200 base pair inverted repeats (ITRs), which are cis elements necessary for viral DNA replication and packaging. The early (E) and late (L) regions of the genome contain different transcription units that are divided by the onset of viral DNA replication. The E1 region (E1A and E1B) encodes proteins responsible for the regulation of transcription of the viral genome and a few cellular genes. The expression of the E2 region (E2A and E2B) results in the synthesis of the proteins for viral DNA replication. These proteins are involved in DNA replication, late gene expression and host cell shut-off (Renan, 1990). The products of the late genes, including the majority of the viral capsid proteins, are expressed only after significant processing of a single primary transcript issued by the major late promoter (MLP). The MLP, (located at 16.8 m.u.) is particularly efficient during the late phase of infection, and all the mRNA's issued from this promoter possess a 5′-tripartite leader (TPL) sequence which makes them preferred mRNA's for translation.

[0287] In a current system, recombinant adenovirus is generated from homologous recombination between shuttle vector and provirus vector. Due to the possible recombination between two proviral vectors, wild-type adenovirus may be generated from this process. Therefore, it is critical to isolate a single clone of virus from an individual plaque and examine its genomic structure.

[0288] Generation and propagation of the current adenovirus vectors, which are replication deficient, depend on a unique helper cell line, designated 293, which was transformed from human embryonic kidney cells by Ad5 DNA fragments and constitutively expresses E1 proteins (Graham et al., 1977). Since the E3 region is dispensable from the adenovirus genome (Jones and Shenk, 1978), the current adenovirus vectors, with the help of 293 cells, carry foreign DNA in either the E1, the D3 or both regions (Graham and Prevec, 1991). In nature, adenovirus can package approximately 105% of the wild-type genome (Ghosh-Choudhury et al., 1987), providing capacity for about 2 extra kB of DNA Combined with the approximately 5.5 kB of DNA that is replaceable in the E1 and E3 regions, the maximum capacity of the current adenovirus vector is under 7.5 kB, or about 15% of the total length of the vector. More than 80% of the adenovirus viral genome remains in the vector backbone and is the source of vector-borne cytotoxicity. Also, the replication deficiency of the E1-deleted virus is incomplete. For example, leakage of viral gene expression has been observed with the currently available vectors at high multiplicities of infection (MOI) (Mulligan, 1993).

[0289] Helper cell lines may be derived from human cells such as human embryonic kidney cells, muscle cells, hematopoietic cells or other human embryonic mesenchymal or epithelial cells. Alternatively, the helper cells may be derived from the cells of other mammalian species that are permissive for human adenovirus. Such cells include, e.g., Vero cells or other monkey embryonic mesenchymal or epithelial cells. As stated above, the currently preferred helper cell line is 293.

[0290] Recently, Racher et al. (1995) disclosed improved methods for culturing 293 cells and propagating adenovirus. In one format, natural cell aggregates are grown by inoculating individual cells into 1 liter siliconized spinner flasks (Techne, Cambridge, UK) containing 100-200 ml of medium. Following stirring at 40 rpm, the cell viability is estimated with trypan blue. In another format, Fibra-Cel microcarriers (Bibby Sterlin, Stone, UK) (5 g/l) is employed as follows. A cell inoculum, resuspended in 5 ml of medium, is added to the carrier (50 ml) in a 250 ml Erlenmeyer flask and left stationary, with occasional agitation, for 1 to 4 h. The medium is then replaced with 50 ml of fresh medium and shaking initiated. For virus production, cells are allowed to grow to about 80% confluence, after which time the medium is replaced (to 25% of the final volume) and adenovirus added at an MOI of 0.05. Cultures are left stationary overnight, following which the volume is increased to 100% and shaking commenced for another 72 h.

[0291] Other than the requirement that the adenovirus vector be replication defective, or at least conditionally defective, the nature of the adenovirus vector is not believed to be crucial to the successful practice of the invention. The adenovirus may be of any of the 42 different known serotypes or subgroups A-F. Adenovirus type 5 of subgroup C is the preferred starting material in order to obtain a conditional replication-defective adenovirus vector for use in the present invention, since Adenovirus type 5 is a human adenovirus about which a great deal of biochemical and genetic information is known, and it has historically been used for most constructions employing adenovirus as a vector.

[0292] As stated above, the typical vector according to the present invention is replication defective and will not have an adenovirus E1 region. Thus, it will be most convenient to introduce the polynucleotide encoding the gene of interest at the position from which the E1-coding sequences have been removed. However, the position of insertion of the construct within the adenovirus sequences is not critical to the invention. The polynucleotide encoding the gene of interest may also be inserted in lieu of the deleted E3 region in E3 replacement vectors as described by Karlsson et al. (1986) or in the E4 region where a helper cell line or helper virus complements the E4 defect.

[0293] Adenovirus is easy to grow and manipulate and exhibits broad host range in vitro and in vivo. This group of viruses can be obtained in high titers, e.g., 10⁹-10¹¹ plaque-forming units per ml, and they are highly infective. The life cycle of adenovirus does not require integration into the host cell genome. The foreign genes delivered by adenovirus vectors are episomal and, therefore, have low genotoxicity to host cells. No side effects have been reported in studies of vaccination with wild-type adenovirus (Couch et al., 1963; Top et al., 1971), demonstrating their safety and therapeutic potential as in vivo gene transfer vectors.

[0294] Adenovirus vectors have been used in eukaryotic gene expression (Levrero et al., 1991; Gomez-Foix et al., 1992) and vaccine development (Grunhaus and Horwitz, 1992; Graham and Prevec, 1992). Recently, animal studies suggested that recombinant adenovirus could be used for gene therapy (Stratford-Perricaudet and Perricaudet, 1991; Stratford-Perricaudet et al., 1990; Rich et al., 1993). Studies in administering recombinant adenovirus to different tissues include trachea instillation (Rosenfeld et al., 1991; Rosenfeld et al., 1992), muscle injection (Ragot et al., 1993), peripheral intravenous injections (Herz and Gerard, 1993) and stereotactic inoculation into the brain (Le Gal La Salle et al., 1993).

[0295] 4.15.2 Retroviruses

[0296] The retroviruses are a group of single-stranded RNA viruses characterized by an ability to convert their RNA to double-stranded DNA in infected cells by a process of reverse-transcription (Coffin, 1990). The resulting DNA then stably integrates into cellular chromosomes as a provirus and directs synthesis of viral proteins. The integration results in the retention of the viral gene sequences in the recipient cell and its descendants. The retroviral genome contains three genes, gag, pol, and env that code for capsid proteins, polymerase enzyme, and envelope components, respectively. A sequence found upstream from the gag gene contains a signal for packaging of the genome into virions. Two long terminal repeat (LTR) sequences are present at the 5′ and 3′ ends of the viral genome. These contain strong promoter and enhancer sequences and are also required for integration in the host cell genome (Coffin, 1990).

[0297] In order to construct a retroviral vector, a nucleic acid encoding one or more oligonucleotide or polynucleotide sequences of interest is inserted into the viral genome in the place of certain viral sequences to produce a virus that is replication-defective. In order to produce virions, a packaging cell line containing the gag, pol, and env genes but without the LTR and packaging components is constructed (Mann et al., 1983). When a recombinant plasmid containing a cDNA, together with the retroviral LTR and packaging sequences is introduced into this cell line (by calcium phosphate precipitation for example), the packaging sequence allows the RNA transcript of the recombinant plasmid to be packaged into viral particles, which are then secreted into the culture media (Nicolas and Rubenstein, 1988; Temin, 1986; Mann et al., 1983). The media containing the recombinant retroviruses is then collected, optionally concentrated, and used for gene transfer. Retroviral vectors are able to infect a broad variety of cell types. However, integration and stable expression require the division of host cells (Paskind et al., 1975).

[0298] A novel approach designed to allow specific targeting of retrovirus vectors was recently developed based on the chemical modification of a retrovirus by the chemical addition of lactose residues to the viral envelope. This modification could permit the specific infection of hepatocytes via sialoglycoprotein receptors.

[0299] A different approach to targeting of recombinant retroviruses was designed in which biotinylated antibodies against a retroviral envelope protein and against a specific cell receptor were used. The antibodies were coupled via the biotin components by using streptavidin (Roux et al., 1989). Using antibodies against major histocompatibility complex class I and class II antigens, they demonstrated the infection of a variety of human cells that bore those surface antigens with an ecotropic virus in vitro Roux et al., 1989).

[0300] 4.15.3 Adeno-Associated Viruses

[0301] AAV (Ridgeway, 1988; Hermonat and Muzycska, 1984) is a parovirus, discovered as a contamination of adenoviral stocks. It is a ubiquitous virus (antibodies are present in 85% of the US human population) that has not been linked to any disease. It is also classified as a dependovirus, because its replications is dependent on the presence of a helper virus, such as adenovirus. Five serotypes have been isolated, of which AAV-2 is the best characterized. AAV has a single-stranded linear DNA that is encapsidated into capsid proteins VP1, VP2 and VP3 to form an icosahedral virion of 20 to 24 nm in diameter (Muzyczka and McLaughlin, 1988).

[0302] The AAV DNA is approximately 4.7 kilobases long. It contains two open reading frames and is flanked by two ITRs. There are two major genes in the AAV genome: rep and cap. The rep gene codes for proteins responsible for viral replications, whereas cap codes for capsid protein VP1-3. Each ITR forms a T-shaped hairpin structure. These terminal repeats are the only essential cis components of the AAV for chromosomal integration. Therefore, the AAV can be used as a vector with all viral coding sequences removed and replaced by the cassette of genes for delivery. Three viral promoters have been identified and named p5, p19, and p40, according to their map position. Transcription from p5 and p19 results in production of rep proteins, and transcription from p40 produces the capsid proteins (Hermonat and Muzyczka, 1984).

[0303] There are several factors that prompted researchers to study the possibility of using rAAV as an expression vector. One is that the requirements for delivering a gene to integrate into the host chromosome are surprisingly few. It is necessary to have the 145-bp ITRs, which are only 6% of the AAV genome. This leaves room in the vector to assemble a 4.5-kb DNA insertion. While this carrying capacity may prevent the AAV from delivering large genes, it is amply suited for delivering the antisense constructs of the present invention AAV is also a good choice of delivery vehicles due to its safety. There is a relatively complicated rescue mechanism: not only wild type adenovirus but also AAV genes are required to mobilize rAAV. Likewise, AAV is not pathogenic and not associated with any disease. The removal of viral coding sequences minimizes immune reactions to viral gene expression, and therefore, rAAV does not evoke an inflammatory response.

[0304] 4.15.4 Other Viral Vectors as Expression Constructs

[0305] Other viral vectors may be employed as expression constructs in the present invention for the delivery of oligonucleotide or polynucleotide sequences to a host cell. Vectors derived from viruses such as vaccinia virus (Ridgeway, 1988; Coupar et al., 1988), lentiviruses, polio viruses and herpes viruses may be employed. They offer several attractive features for various mammalian cells (Friedmann, 1989; Ridgeway, 1988; Coupar et al., 1988; Horwich et al., 1990).

[0306] With the recent recognition of defective hepatitis B viruses, new insight was gained into the structure-function relationship of different viral sequences. In vitro studies showed that the virus could retain the ability for helper-dependent packaging and reverse transcription despite the deletion of up to 80% of its genome (Horwich et al., 1990). This suggested that large portions of the genome could be replaced with foreign genetic material. The hepatotropism and persistence (integration) were particularly attractive properties for liver-directed gene transfer. Chang et al. (1991) introduced the chloramphenicol acetyltransferase (CAT) gene into duck hepatitis B virus genome in the place of the polymerase, surface, and pre-surface coding sequences. It was cotransfected with wild-type virus into an avian hepatoma cell line. Culture media containing high titers of the recombinant virus were used to infect primary duckling hepatocytes. Stable CAT gene expression was detected for at least 24 days after transfection (Chang et al., 1991).

[0307] 4.15.5 Non-Viral Vectors

[0308] In order to effect expression of the oligonucleotide or polynucleotide sequences of the present invention, the expression construct must be delivered into a cell. This delivery may be accomplished in vitro, as in laboratory procedures for transforming cells lines, or in vivo or ex vivo, as in the treatment of certain disease states. As described above, one preferred mechanism for delivery is via viral infection where the expression construct is encapsulated in an infectious viral particle.

[0309] Once the expression construct has been delivered into the cell the nucleic acid encoding the desired oligonucleotide or polynucleotide sequences may be positioned and expressed at different sites. In certain embodiments, the nucleic acid encoding the construct may be stably integrated into the genome of the cell. This integration may be in the specific location and orientation via homologous recombination (gene replacement) or it may be integrated in a random, non-specific location (gene augmentation). In yet further embodiments, the nucleic acid may be stably maintained in the cell as a separate, episomal segment of DNA. Such nucleic acid segments or “episomes” encode sequences sufficient to permit maintenance and replication independent of or in synchronization with the host cell cycle. How the expression construct is delivered to a cell and where in the cell the nucleic acid remains is dependent on the type of expression construct employed.

[0310] In certain embodiments of the invention, the expression construct comprising one or more oligonucleotide or polynucleotide sequences may simply consist of naked recombinant DNA or plasmids. Transfer of the construct may be performed by any of the methods mentioned above which physically or chemically permeabilize the cell membrane. This is particularly applicable for transfer in vitro but it may be applied to in vivo use as well. Dubensky et al. (1984) successfully injected polyomavirus DNA in the form of calcium phosphate precipitates into liver and spleen of adult and newborn mice demonstrating active viral replication and acute infection. Benvenisty and Reshef (1986) also demonstrated that direct intraperitoneal injection of calcium phosphate-precipitated plasmids results in expression of the transfected genes. It is envisioned that DNA encoding a gene of interest may also be transferred in a similar manner in vivo and express the gene product.

[0311] Another embodiment of the invention for transferring a naked DNA expression construct into cells may involve particle bombardment. This method depends on the ability to accelerate DNA-coated microprojectiles to a high velocity allowing them to pierce cell membranes and enter cells without killing them (Klein et al., 1987). Several devices for accelerating small particles have been developed. One such device relies on a high voltage discharge to generate an electrical current, which in turn provides the motive force (Yang et al., 1990). The microprojectiles used have consisted of biologically inert substances such as tungsten or gold beads.

[0312] Selected organs including the liver, skin, and muscle tissue of rats and mice have been bombarded in vivo (Yang et al., 1990; Zelenin et al., 1991). This may require surgical exposure of the tissue or cells, to eliminate any intervening tissue between the gun and the target organ, i.e. ex vivo treatment. Again, DNA encoding a particular gene may be delivered via this method and still be incorporated by the present invention.

[0313] 4.16 Antisense Oligonucleotides

[0314] The end result of the flow of genetic information is the synthesis of protein. DNA is transcribed by polymerases into messenger RNA and translated on the ribosome to yield a folded, functional protein. Thus there are several steps along the route where protein synthesis can be inhibited. The native DNA segment coding for a polypeptide described herein, as all such mammalian DNA strands, has two strands: a sense strand and an antisense strand held together by hydrogen bonding. The messenger RNA coding for polypeptide has the same nucleotide sequence as the sense DNA strand except that the DNA thymidine is replaced by uridine. Thus, synthetic antisense nucleotide sequences will bind to a mRNA and inhibit expression of the protein encoded by that mRNA.

[0315] The targeting of antisense oligonucleotides to mRNA is thus one mechanism to shut down protein synthesis, and, consequently, represents a powerful and targeted therapeutic approach. For example, the synthesis of polygalactauronase and the muscarine type 2 acetylcholine receptor are inhibited by antisense oligonucleotides directed to their respective mRNA sequences (U.S. Pat. No. 5,739,119 and U.S. Pat. No. 5,759,829, each specifically incorporated herein by reference in its entirety). Further, examples of antisense inhibition have been demonstrated with the nuclear protein cyclin, the multiple drug resistance gene (MDG1), ICAM-1, E-selectin, STK-1, striatal GABA_{A} receptor and human EGF (Jaskulski et al., 1988; Vasanthakumar and Ahmed, 1989; Peris et al., 1998; U.S. Pat. No. 5,801,154; U.S. Pat. No. 5,789,573; U.S. Pat. No. 5,718,709 and U.S. Pat. No. 5,610,288, each specifically incorporated herein by reference in its entirety). Antisense constructs have also been described that inhibit and can be used to treat a variety of abnormal cellular proliferations, e.g. cancer (U.S. Pat. No. 5,747,470; U.S. Pat. No. 5,591,317 and U.S. Pat. No. 5,783,683, each specifically incorporated herein by reference in its entirety).

[0316] Therefore, in exemplary embodiments, the invention provides oligonucleotide sequences that comprise all, or a portion of, any sequence that is capable of specifically binding to polynucleotide sequence described herein, or a complement thereof. In one embodiment, the antisense oligonucleotides comprise DNA or derivatives thereof. In another embodiment, the oligonucleotides comprise RNA or derivatives thereof. In a third embodiment, the oligonucleotides are modified DNAs comprising a phosphorothioated modified backbone. In a fourth embodiment, the oligonucleotide sequences comprise peptide nucleic acids or derivatives thereof. In each case, preferred compositions comprise a sequence region that is complementary, and more preferably substantially-complementary, and even more preferably, completely complementary to one or more portions of polynucleotides disclosed herein.

[0317] Selection of antisense compositions specific for a given gene sequence is based upon analysis of the chosen target sequence (i.e. in these illustrative examples the rat and human sequences) and determination of secondary structure, Tₘ, binding energy, relative stability, and antisense compositions were selected based upon their relative inability to form dimers, hairpins, or other secondary structures that would reduce or prohibit specific binding to the target mRNA in a host cell.

[0318] Highly preferred target regions of the mRNA, are those which are at or near the AUG translation initiation codon, and those sequences which were substantially complementary to 5′ regions of the mRNA. These secondary structure analyses and target site selection considerations were performed using v.4 of the OLIGO primer analysis software (Rychlik, 1997) and the BLASTN 2.0.5 algorithm software (Altschul et al., 1997).

[0319] The use of an antisense delivery method employing a short peptide vector, termed MPG (27 residues), is also contemplated. The MPG peptide contains a hydrophobic domain derived from the fusion sequence of HIV gp41 and a hydrophilic domain from the nuclear localization sequence of SV40 T-antigen (Morris et al., 1997). It has been demonstrated that several molecules of the MPG peptide coat the antisense oligonucleotides and can be delivered into cultured mammalian cells in less than 1 hour with relatively high efficiency (90%). Further, the interaction with MPG strongly increases both the stability of the oligonucleotide to nuclease and the ability to cross the plasma membrane (Morris et al., 1997).

[0320] 4.17 Ribozymes

[0321] Although proteins traditionally have been used for catalysis of nucleic acids, another class of macromolecules has emerged as useful in this endeavor. Ribozymes are RNA-protein complexes that cleave nucleic acids in a site-specific fashion. Ribozymes have specific catalytic domains that possess endonuclease activity (Kim and Cech, 1987; Gerlach et al., 1987; Forster and Symons, 1987). For example, a large number of ribozymes accelerate phosphoester transfer reactions with a high degree of specificity, often cleaving only one of several phosphoesters in an oligonucleotide substrate (Cech et al., 1981; Michel and Westhof, 1990; Reinhold-Hurek and Shub, 1992). This specificity has been attributed to the requirement that the substrate bind via specific base-pairing interactions to the internal guide sequence (“IGS”) of the ribozyme prior to chemical reaction.

[0322] Ribozyme catalysis has primarily been observed as part of sequence-specific cleavage/ligation reactions involving nucleic acids (Joyce, 1989; Cech et al., 1981). For example, U.S. Pat. No. 5,354,855 (specifically incorporated herein by reference) reports that certain ribozymes can act as endonucleases with a sequence specificity greater than that of known ribonucleases and approaching that of the DNA restriction enzymes. Thus, sequence-specific ribozyme-mediated inhibition of gene expression may be particularly suited to therapeutic applications (Scanlon et al., 1991; Sarver et al., 1990). Recently, it was reported that ribozymes elicited genetic changes in some cells lines to which they were applied; the altered genes included the oncogenes H-ras, c-fos and genes of HIV. Most of this work involved the modification of a target mRNA, based on a specific mutant codon that is cleaved by a specific ribozyme.

[0323] Six basic varieties of naturally-occurring enzymatic RNAs are known presently. Each can catalyze the hydrolysis of RNA phosphodiester bonds in trans (and thus can cleave other RNA molecules) under physiological conditions. In general, enzymatic nucleic acids act by first binding to a target RNA. Such binding occurs through the target binding portion of a enzymatic nucleic acid which is held in close proximity to an enzymatic portion of the molecule that acts to cleave the target RNA. Thus, the enzymatic nucleic acid first recognizes and then binds a target RNA through complementary base-pairing, and once bound to the correct site, acts enzymatically to cut the target RNA. Strategic cleavage of such a target RNA will destroy its ability to direct synthesis of an encoded protein. After an enzymatic nucleic acid has bound and cleaved its RNA target, it is released from that RNA to search for another target and can repeatedly bind and cleave new targets.

[0324] The enzymatic nature of a ribozyme is advantageous over many technologies, such as antisense technology (where a nucleic acid molecule simply binds to a nucleic acid target to block its translation) since the concentration of ribozyme necessary to affect a therapeutic treatment is lower than that of an antisense oligonucleotide. This advantage reflects the ability of the ribozyme to act enzymatically. Thus, a single ribozyme molecule is able to cleave many molecules of target RNA. In addition, the ribozyme is a highly specific inhibitor, with the specificity of inhibition depending not only on the base pairing mechanism of binding to the target RNA, but also on the mechanism of target RNA cleavage. Single mismatches, or base-substitutions, near the site of cleavage can completely eliminate catalytic activity of a ribozyme. Similar mismatches in antisense molecules do not prevent their action (Woolf et al., 1992). Thus, the specificity of action of a ribozyme is greater than that of an antisense oligonucleotide binding the same RNA site.

[0325] The enzymatic nucleic acid molecule may be formed in a hammerhead, hairpin, a hepatitis δ virus, group I intron or RNaseP RNA (in association with an RNA guide sequence) or Neurospora VS RNA motif. Examples of hammerhead motifs are described by Rossi et al (1992). Examples of hairpin motifs are described by Hampel et al. (Eur. Pat. Appl. Publ. No. EP 0360257), Hampel and Tritz (1989), Hampel et al. (1990) and U.S. Pat. No. 5,631,359 (specifically incorporated herein by reference). An example of the hepatitis δ virus motif is described by Perrotta and Been (1992); an example of the RNaseP motif is described by Guerrier-Takada et al. (1983); Neurospora VS RNA ribozyme motif is described by Collins (Saville and Collins, 1990; Saville and Collins, 1991; Collins and Olive, 1993); and an example of the Group I intron is described in (U.S. Pat. No. 4,987,071, specifically incorporated herein by reference). All that is important in an enzymatic nucleic acid molecule of this invention is that it has a specific substrate binding site which is complementary to one or more of the target gene RNA regions, and that it have nucleotide sequences within or surrounding that substrate binding site which impart an RNA cleaving activity to the molecule. Thus the ribozyme constructs need not be limited to specific motifs mentioned herein.

[0326] In certain embodiments, it may be important to produce enzymatic cleaving agents which exhibit a high degree of specificity for the RNA of a desired target, such as one of the sequences disclosed herein. The enzymatic nucleic acid molecule is preferably targeted to a highly conserved sequence region of a target mRNA. Such enzymatic nucleic acid molecules can be delivered exogenously to specific cells as required. Alternatively, the ribozymes can be expressed from DNA or RNA vectors that are delivered to specific cells.

[0327] Small enzymatic nucleic acid motifs (e.g., of the hammerhead or the hairpin structure) may also be used for exogenous delivery. The simple structure of these molecules increases the ability of the enzymatic nucleic acid to invade targeted regions of the mRNA structure. Alternatively, catalytic RNA molecules can be expressed within cells from eukaryotic promoters (e.g., Scanlon et al, 1991; Kashani-Sabet et al, 1992; Dropulic et al., 1992; Weerasinghe et al., 1991; Ojwang et al., 1992; Chen et al., 1992; Sarver et al., 1990). Those skilled in the art realize that any ribozyme can be expressed in eukaryotic cells from the appropriate DNA vector. The activity of such ribozymes can be augmented by their release from the primary transcript by a second ribozyme (Int. Pat. Appl. Publ. No. WO 93/23569, and Int. Pat. Appl. Publ. No. WO 94/02595, both hereby incorporated by reference; Ohkawa et al., 1992; Taira et al., 1991; and Ventura et al., 1993).

[0328] Ribozymes may be added directly, or can be complexed with cationic lipids, lipid complexes, packaged within liposomes, or otherwise delivered to target cells. The RNA or RNA complexes can be locally administered to relevant tissues ex vivo, or in vivo through injection, aerosol inhalation, infusion pump or stent, with or without their incorporation in biopolymers.

[0329] Ribozymes may be designed as described in Int. Pat. Appl. Publ. No. WO 93/23569 and Int. Pat. Appl. Publ. No. WO 94/02595, each specifically incorporated herein by reference) and synthesized to be tested in vitro and in vivo, as described. Such ribozymes can also be optimized for delivery. While specific examples are provided, those in the art will recognize that equivalent RNA targets in other species can be utilized when necessary.

[0330] Hammerhead or hairpin ribozymes may be individually analyzed by computer folding (Jaeger et al., 1989) to assess whether the ribozyme sequences fold into the appropriate secondary structure. Those ribozymes with unfavorable intramolecular interactions between the binding arms and the catalytic core are eliminated from consideration. Varying binding arm lengths can be chosen to optimize activity. Generally, at least 5 or so bases on each arm are able to bind to, or otherwise interact with, the target RNA.

[0331] Ribozymes of the hammerhead or hairpin motif may be designed to anneal to various sites in the mRNA message, and can be chemically synthesized. The method of synthesis used follows the procedure for normal RNA synthesis as described in Usman et al. (1987) and in Scaringe et al. (1990) and makes use of common nucleic acid protecting and coupling groups, such as dimethoxytrityl at the 5′-end, and phosphoramidites at the 3′-end. Average stepwise coupling yields are typically >98%. Hairpin ribozymes may be synthesized in two parts and annealed to reconstruct an active ribozyme (Chowrira and Burke, 1992). Ribozymes may be modified extensively to enhance stability by modification with nuclease resistant groups, for example, 2′-amino, 2′-C-allyl, 2′-flouro, 2′-o-methyl, 2′-H (for a review see e.g., Usman and Cedergren, 1992). Ribozymes may be purified by gel electrophoresis using general methods or by high pressure liquid chromatography and resuspended in water.

[0332] Ribozyme activity can be optimized by altering the length of the ribozyme binding arms, or chemically synthesizing ribozymes with modifications that prevent their degradation by serum ribonucleases (see e.g., Int. Pat. Appl. Publ. No. WO 92/07065; Perrault et al, 1990; Pieken et al., 1991; Usman and Cedergren, 1992; Int. Pat. Appl. Publ. No. WO 93/15187; Int. Pat. Appl. Publ. No. WO 91/03162; Eur. Pat. Appl. Publ. No. 92110298.4; U.S. Pat. No. 5,334,711; and Int. Pat. Appl. Publ. No. WO 94/13688, which describe various chemical modifications that can be made to the sugar moieties of enzymatic RNA molecules), modifications which enhance their efficacy in cells, and removal of stem II bases to shorten RNA synthesis times and reduce chemical requirements.

[0333] Sullivan et al. (Int. Pat. Appl. Publ. No. WO 94/02595) describes the general methods for delivery of enzymatic RNA molecules. Ribozymes may be administered to cells by a variety of methods known to those familiar to the art, including, but not restricted to, encapsulation in liposomes, by iontophoresis, or by incorporation into other vehicles, such as hydrogels, cyclodextrins, biodegradable nanocapsules, and bioadhesive microspheres. For some indications, ribozymes may be directly delivered ex vivo to cells or tissues with or without the aforementioned vehicles. Alternatively, the RNA/vehicle combination may be locally delivered by direct inhalation, by direct injection or by use of a catheter, infusion pump or stent. Other routes of delivery include, but are not limited to, intravascular, intramuscular, subcutaneous or joint injection, aerosol inhalation, oral (tablet or pill form), topical, systemic, ocular, intraperitoneal and/or intrathecal delivery. More detailed descriptions of ribozyme delivery and administration are provided in Int. Pat. Appl. Publ. No. WO 94/02595 and Int. Pat. Appl. Publ. No. WO 93/23569, each specifically incorporated herein by reference.

[0334] Another means of accumulating high concentrations of a ribozyme(s) within cells is to incorporate the ribozyme-encoding sequences into a DNA expression vector. Transcription of the ribozyme sequences are driven from a promoter for eukaryotic RNA polymerase I (pol I), RNA polymerase II (pol II), or RNA polymerase III (pol III). Transcripts from pol II or pol III promoters will be expressed at high levels in all cells; the levels of a given pol II promoter in a given cell type will depend on the nature of the gene regulatory sequences (enhancers, silencers, etc.) present nearby. Prokaryotic RNA polymerase promoters may also be used, providing that the prokaryotic RNA polymerase enzyme is expressed in the appropriate cells (Elroy-Stein and Moss, 1990; Gao and Huang, 1993; Lieber et al., 1993; Zhou et al., 1990). Ribozymes expressed from such promoters can function in mammalian cells (e.g. Kashani-Saber et al, 1992; Ojwang et al., 1992; Chen et al., 1992; Yu et al., 1993; L'Huillier et al., 1992; Lisziewicz et al., 1993). Such transcription units can be incorporated into a variety of vectors for introduction into mammalian cells, including but not restricted to, plasmid DNA vectors, viral DNA vectors (such as adenovirus or adeno-associated vectors), or viral RNA vectors (such as retroviral, semliki forest virus, sindbis virus vectors).

[0335] Ribozymes may be used as diagnostic tools to examine genetic drift and mutations within diseased cells. They can also be used to assess levels of the target RNA molecule. The close relationship between ribozyme activity and the structure of the target RNA allows the detection of mutations in any region of the molecule which alters the base-pairing and three-dimensional structure of the target RNA. By using multiple ribozymes, one may map nucleotide changes which are important to RNA structure and function in vitro, as well as in cells and tissues. Cleavage of target RNAs with ribozymes may be used to inhibit gene expression and define the role (essentially) of specified gene products in the progression of disease. In this manner, other genetic targets may be defined as important mediators of the disease. These studies will lead to better treatment of the disease progression by affording the possibility of combinational therapies (e.g., multiple ribozymes targeted to different genes, ribozymes coupled with known small molecule inhibitors, or intermittent treatment with combinations of ribozymes and/or other chemical or biological molecules). Other in vitro uses of ribozymes are well known in the art, and include detection of the presence of mRNA associated with an IL-5 related condition. Such RNA is detected by determining the presence of a cleavage product after treatment with a ribozyme using standard methodology.

[0336] 4.18 Peptide Nucleic Acids

[0337] In certain embodiments, the inventors contemplate the use of peptide nucleic acids (PNAs) in the practice of the methods of the invention. PNA is a DNA mimic in which the nucleobases are attached to a pseudopeptide backbone (Good and Nielsen, 1997). PNA is able to be utilized in a number methods that traditionally have used RNA or DNA. Often PNA sequences perform better in techniques than the corresponding RNA or DNA sequences and have utilities that are not inherent to RNA or DNA. A review of PNA including methods of making, characteristics of, and methods of using, is provided by Corey (1997) and is incorporated herein by reference. As such, in certain embodiments, one may prepare PNA sequences that are complementary to one or more portions of the ACE mRNA sequence, and such PNA compositions may be used to regulate, alter, decrease, or reduce the translation of ACE-specific mRNA, and thereby alter the level of ACE activity in a host cell to which such PNA compositions have been administered.

[0338] PNAs have 2-aminoethyl-glycine linkages replacing the normal phosphodiester backbone of DNA (Nielsen et al., 1991; Hanvey et al., 1992; Hyrup and Nielsen, 1996; Neilsen, 1996). This chemistry has three important consequences: firstly, in contrast to DNA or phosphorothioate oligonucleotides, PNAs are neutral molecules; secondly, PNAs are achiral which avoids the need to develop a stereoselective synthesis; and thirdly, PNA synthesis uses standard Boc (Dueholm et al., 1994) or Fmoc (Thomson et al., 1995) protocols for solid-phase peptide synthesis, although other methods, including a modified Merrifield method, have been used (Christensen et al., 1995).

[0339] PNA monomers or ready-made oligomers are commercially available from PerSeptive Biosystems (Framingham, Mass.). PNA syntheses by either Boc or Fmoc protocols are straightforward using manual or automated protocols (Norton et al, 1995). The manual protocol lends itself to the production of chemically modified PNAs or the simultaneous synthesis of families of closely related PNAs.

[0340] As with peptide synthesis, the success of a particular PNA synthesis will depend on the properties of the chosen sequence. For example, while in theory PNAs can incorporate any combination of nucleotide bases, the presence of adjacent purines can lead to deletions of one or more residues in the product. In expectation of this difficulty, it is suggested that, in producing PNAs with adjacent purines, one should repeat the coupling of residues likely to be added inefficiently. This should be followed by the purification of PNAs by reverse-phase high-pressure liquid chromatography (Norton et al., 1995) providing yields and purity of product similar to those observed during the synthesis of peptides.

[0341] Modifications of PNAs for a given application may be accomplished by coupling amino acids during solid-phase synthesis or by attaching compounds that contain a carboxylic acid group to the exposed N-terminal amine. Alternatively, PNAs can be modified after synthesis by coupling to an introduced lysine or cysteine. The ease with which PNAs can be modified facilitates optimization for better solubility or for specific functional requirements. Once synthesized, the identity of PNAs and their derivatives can be confirmed by mass spectrometry. Several studies have made and utilized modifications of PNAs (Norton et al., 1995; Haaima et al., 1996; Stetsenko et al., 1996; Petersen et al., 1995; Ulmann et al., 1996; Koch et al., 1995; Orum et al., 1995; Footer et al., 1996; Griffith et al., 1995; Kremsky et al., 1996; Pardridge et al., 1995; Boffa et al., 1995; Landsdorp et al., 1996; Gambacorti-Passerini et al., 1996; Armitage et al., 1997; Seeger et al, 1997; Ruskowski et al., 1997). U.S. Pat. No. 5,700,922 discusses PNA-DNA-PNA chimeric molecules and their uses in diagnostics, modulating protein in organisms, and treatment of conditions susceptible to therapeutics.

[0342] In contrast to DNA and RNA, which contain negatively charged linkages, the PNA backbone is neutral. In spite of this dramatic alteration, PNAs recognize complementary DNA and RNA by Watson-Crick pairing (Egholm et al., 1993), validating the initial modeling by Nielsen et al. (1991). PNAs lack 3′ to 5′ polarity and can bind in either parallel or anti-parallel fashion, with the anti-parallel mode being preferred (Egholm et al, 1993).

[0343] Hybridization of DNA oligonucleotides to DNA and RNA is destabilized by electrostatic repulsion between the negatively charged phosphate backbones of the complementary strands. By contrast, the absence of charge repulsion in PNA-DNA or PNA-RNA duplexes increases the melting temperature (Tₘ) and reduces the dependence of Tₘ on the concentration of mono- or divalent cations (Nielsen et al., 1991). The enhanced rate and affinity of hybridization are significant because they are responsible for the surprising ability of PNAs to perform strand invasion of complementary sequences within relaxed double-stranded DNA. In addition, the efficient hybridization at inverted repeats suggests that PNAs can recognize secondary structure effectively within double-stranded DNA. Enhanced recognition also occurs with PNAs immobilized on surfaces, and Wang et al. have shown that support-bound PNAs can be used to detect hybridization events (Wang et al., 1996).

[0344] One might expect that tight binding of PNAs to complementary sequences would also increase binding to similar (but not identical) sequences, reducing the sequence specificity of PNA recognition. As with DNA hybridization, however, selective recognition can be achieved by balancing oligomer length and incubation temperature. Moreover, selective hybridization of PNAs is encouraged by PNA-DNA hybridization being less tolerant of base mismatches than DNA-DNA hybridization. For example, a single mismatch within a 16 bp PNA-DNA duplex can reduce the Tₘ by up to 15° C. (Egholm et al., 1993). This high level of discrimination has allowed the development of several PNA-based strategies for the analysis of point mutations (Wang et al., 1996; Carlsson et al., 1996; Thiede et al., 1996; Webb and Hurskainen, 1996; Perry-O'Keefe et al., 1996).

[0345] High-affinity binding provides clear advantages for molecular recognition and the development of new applications for PNAs. For example, 11-13 nucleotide PNAs inhibit the activity of telomerase, a ribonucleo-protein that extends telomere ends using an essential RNA template, while the analogous DNA oligomers do not (Norton et al., 1996).

[0346] Neutral PNAs are more hydrophobic than analogous DNA oligomers, and this can lead to difficulty solubilizing them at neutral pH, especially if the PNAs have a high purine content or if they have the potential to form secondary structures. Their solubility can be enhanced by attaching one or more positive charges to the PNA termini (Nielsen et al., 1991).

[0347] Findings by Allfrey and colleagues suggest that strand invasion will occur spontaneously at sequences within chromosomal DNA (Boffa et al., 1995; Boffa et al., 1996). These studies targeted PNAs to triplet repeats of the nucleotides CAG and used this recognition to purify transcriptionally active DNA (Boffa et al., 1995) and to inhibit transcription (Boffa et al., 1996). This result suggests that if PNAs can be delivered within cells then they will have the potential to be general sequence-specific regulators of gene expression. Studies and reviews concerning the use of PNAs as antisense and anti-gene agents include Nielsen et al. (1993b), Hanvey et al. (1992), and Good and Nielsen (1997). Koppelhus et al. (1997) have used PNAs to inhibit HIV-1 inverse transcription, showing that PNAs may be used for antiviral therapies.

[0348] Methods of characterizing the antisense binding properties of PNAs are discussed in Rose (1993) and Jensen et al. (1997). Rose uses capillary gel electrophoresis to determine binding of PNAs to their complementary oligonucleotide, measuring the relative binding kinetics and stoichiometry. Similar types of measurements were made by Jensen et al. using BIAcore™ technology.

[0349] Other applications of PNAs include use in DNA strand invasion (Nielsen et al., 1991), antisense inhibition (Hanvey et al., 1992), mutational analysis (Orum et al., 1993), enhancers of transcription (Mollegaard et al., 1994), nucleic acid purification (Orum et al., 1995), isolation of transcriptionally active genes (Boffa et al., 1995), blocking of transcription factor binding (Vickers et al., 1995), genome cleavage (Veselkov et al., 1996), biosensors (Wang et al., 1996), in situ hybridization (Thisted et al., 1996), and in a alternative to Southern blotting (Perry-O'Keefe, 1996).

[0350] 4.19 Polypeptide, Peptides and Peptide Variants

[0351] The present invention, in other aspects, provides polypeptide compositions. Generally, a polypeptide of the invention will be an isolated polypeptide (or an epitope, variant, or active fragment thereof) derived from a mammalian species. Preferably, the polypeptide is encoded by a polynucleotide sequence disclosed herein or a sequence which hybridizes under moderately stringent conditions to a polynucleotide sequence disclosed herein. Alternatively, the polypeptide may be defined as a polypeptide which comprises a contiguous amino acid sequence from an amino acid sequence disclosed herein, or which polypeptide comprises an entire amino acid sequence disclosed herein.

[0352] In the present invention, a polypeptide composition is also understood to comprise one or more polypeptides that are immunologically reactive with antibodies generated against a polypeptide of the invention, particularly a polypeptide having the amino acid sequence encoded by the disclosed polynucleotides, or to active fragments, or to variants or biological functional equivalents thereof.

[0353] Likewise, a polypeptide composition of the present invention is understood to comprise one or more polypeptides that are capable of eliciting antibodies that are immunologically reactive with one or more polypeptides encoded by one or more contiguous nucleic acid sequences disclosed in this application, or to active fragments, or to variants thereof, or to one or more nucleic acid sequences which hybridize to one or more of these sequences under conditions of moderate to high stringency.

[0354] As used herein, an active fragment of a polypeptide includes a whole or a portion of a polypeptide which is modified by conventional techniques, e.g., mutagenesis, or by addition, deletion, or substitution, but which active fragment exhibits substantially the same structure function, antigenicity, etc., as a polypeptide as described herein.

[0355] In certain illustrative embodiments, the polypeptides of the invention will comprise at least an immunogenic portion of a hematological malignancy-related tumor protein or a variant thereof, as described herein. As noted above, a “hematological malignancy-related tumor protein” is a protein that is expressed by hematological malignancy-related tumor cells. Proteins that are hematological malignancy-related tumor proteins also react detectably within an immunoassay (such as an ELISA) with antisera from a patient with hematological malignancy. Polypeptides as described herein may be of any length. Additional sequences derived from the native protein and/or heterologous sequences may be present, and such sequences may (but need not) possess further immunogenic or antigenic properties.

[0356] An “immunogenic portion,” as used herein is a portion of a protein that is recognized (i.e., specifically bound) by a B-cell and/or T-cell surface antigen receptor. Such immunogenic portions generally comprise at least 5 amino acid residues, more preferably at least 10, and still more preferably at least 20 amino acid residues of a hematological malignancy-related tumor protein or a variant thereof. Certain preferred immunogenic portions include peptides in which an N-terminal leader sequence and/or transmembrane domain have been deleted. Other preferred immunogenic portions may contain a small N- and/or C-terminal deletion (e.g., 1-30 amino acids, preferably 5-15 amino acids), relative to the mature protein.

[0357] Immunogenic portions may generally be identified using well known techniques, such as those summarized in Paul, Fundamental Immunology, 3rd ed., 243-247 (Raven Press, 1993) and references cited therein. Such techniques include screening polypeptides for the ability to react with antigen-specific antibodies, antisera and/or T-cell lines or clones. As used herein, antisera and antibodies are “antigen-specific” if they specifically bind to an antigen (i.e., they react with the protein in an ELISA or other immunoassay, and do not react detectably with unrelated proteins). Such antisera and antibodies may be prepared as described herein, and using well known techniques. An immunogenic portion of a native hematological malignancy-related tumor protein is a portion that reacts with such antisera and/or T-cells at a level that is not substantially less than the reactivity of the full length polypeptide (e.g., in an ELISA and/or T-cell reactivity assay). Such immunogenic portions may react within such assays at a level that is similar to or greater than the reactivity of the full length polypeptide. Such screens may generally be performed using methods well known to those of ordinary skill in the art, such as those described in Harlow and Lane, Antibodies: A Laboratory Manual, Cold Spring Harbor Laboratory, 1988. For example, a polypeptide may be immobilized on a solid support and contacted with patient sera to allow binding of antibodies within the sera to the immobilized polypeptide. Unbound sera may then be removed and bound antibodies detected using, for example, ¹²⁵I-labeled Protein A.

[0358] As noted above, a composition may comprise a variant of a native hematological malignancy-related tumor protein. A polypeptide “variant,” as used herein, is a polypeptide that differs from a native hematological malignancy-related tumor protein in one or more substitutions, deletions, additions and/or insertions, such that the immunogenicity of the polypeptide is not substantially diminished. In other words, the ability of a variant to react with antigen-specific antisera may be enhanced or unchanged, relative to the native protein, or may be diminished by less than 50%, and preferably less than 20%, relative to the native protein. Such variants may generally be identified by modifying one of the above polypeptide sequences and evaluating the reactivity of the modified polypeptide with antigen-specific antibodies or antisera as described herein. Preferred variants include those in which one or more portions, such as an N-terminal leader sequence or transmembrane domain, have been removed. Other preferred variants include variants in which a small portion (e.g., 1-30 amino acids, preferably 5-15 amino acids) has been removed from the N- and/or C-terminal of the mature protein.

[0359] Polypeptide variants encompassed by the present invention include those exhibiting at least about 70%, 75%, 80%, 85%, 90%, 91%, 92%, 93%, 94%, 95%, 96%, 97%, 98%, or 99% or more identity (determined as described above) to the polypeptides disclosed herein.

[0360] Preferably, a variant contains conservative substitutions. A “conservative substitution” is one in which an amino acid is substituted for another amino acid that has similar properties, such that one skilled in the art of peptide chemistry would expect the secondary structure and hydropathic nature of the polypeptide to be substantially unchanged. Amino acid substitutions may generally be made on the basis of similarity in polarity, charge, solubility, hydrophobicity, hydrophilicity and/or the amphipathic nature of the residues. For example, negatively charged amino acids include aspartic acid and glutamic acid; positively charged amino acids include lysine and arginine; and amino acids with uncharged polar head groups having similar hydrophilicity values include leucine, isoleucine and valine; glycine and alanine; asparagine and glutamine; and serine, threonine, phenylalanine and tyrosine. Other groups of amino acids that may represent conservative changes include: (1) ala, pro, gly, glu, asp, gln, asn, ser, thr, (2) cys, ser, tyr, thr; (3) val, ile, leu, met, ala, phe; (4) lys, arg, his; and (5) phe, tyr, trp, his. A variant may also, or alternatively, contain nonconservative changes. In a preferred embodiment, variant polypeptides differ from a native sequence by substitution, deletion or addition of five amino acids or fewer. Variants may also (or alternatively) be modified by, for example, the deletion or addition of amino acids that have minimal influence on the immunogenicity, secondary structure and hydropathic nature of the polypeptide.

[0361] As noted above, polypeptides may comprise a signal (or leader) sequence at the N-terminal end of the protein, which co-translationally or post-translationally directs transfer of the protein. The polypeptide may also be conjugated to a linker or other sequence for ease of synthesis, purification or identification of the polypeptide (e.g., poly-His), or to enhance binding of the polypeptide to a solid support. For example, a polypeptide may be conjugated to an immunoglobulin Fc region.

[0362] Polypeptides may be prepared using any of a variety of well known techniques. Recombinant polypeptides encoded by DNA sequences as described above may be readily prepared from the DNA sequences using any of a variety of expression vectors known to those of ordinary skill in the art. Expression may be achieved in any appropriate host cell that has been transformed or transfected with an expression vector containing a DNA molecule that encodes a recombinant polypeptide. Suitable host cells include prokaryotes, yeast, and higher eukaryotic cells, such as mammalian cells and plant cells. Preferably, the host cells employed are E. coli, yeast or a mammalian cell line such as COS or CHO. Supernatants from suitable host/vector systems which secrete recombinant protein or polypeptide into culture media may be first concentrated using a commercially available filter. Following concentration, the concentrate may be applied to a suitable purification matrix such as an affinity matrix or an ion exchange resin. Finally, one or more reverse phase HPLC steps can be employed to further purify a recombinant polypeptide.

[0363] Portions and other variants having less than about 100 amino acids, and generally less than about 50 amino acids, may also be generated by synthetic means, using techniques well known to those of ordinary skill in the art. For example, such polypeptides may be synthesized using any of the commercially available solid-phase techniques, such as the Merrifield solid-phase synthesis method, where amino acids are sequentially added to a growing amino acid chain. See Merrifield, J. Am. Chem. Soc. 85:2149-2146, 1963. Equipment for automated synthesis of polypeptides is commercially available from suppliers such as Perkin Elmer/Applied BioSystems Division (Foster City, Calif.), and may be operated according to the manufacturer's instructions.

[0364] Within certain specific embodiments, a polypeptide may be a fusion protein that comprises multiple polypeptides as described herein, or that comprises at least one polypeptide as described herein and an unrelated sequence, such as a known tumor protein. A fusion partner may, for example, assist in providing T helper epitopes (an immunological fusion partner), preferably T helper epitopes recognized by humans, or may assist in expressing the protein (an expression enhancer) at higher yields than the native recombinant protein. Certain preferred fusion partners are both immunological and expression enhancing fusion partners. Other fusion partners may be selected so as to increase the solubility of the protein or to enable the protein to be targeted to desired intracellular compartments. Still further fusion partners include affinity tags, which facilitate purification of the protein.

[0365] Fusion proteins may generally be prepared using standard techniques, including chemical conjugation. Preferably, a fusion protein is expressed as a recombinant protein, allowing the production of increased levels, relative to a non-fused protein, in an expression system. Briefly, DNA sequences encoding the polypeptide components may be assembled separately, and ligated into an appropriate expression vector. The 3′ end of the DNA sequence encoding one polypeptide component is ligated, with or without a peptide linker, to the 5′ end of a DNA sequence encoding the second polypeptide component so that the reading frames of the sequences are in phase. This permits translation into a single fusion protein that retains the biological activity of both component polypeptides.

[0366] A peptide linker sequence may be employed to separate the first and second polypeptide components by a distance sufficient to ensure that each polypeptide folds into its secondary and tertiary structures. Such a peptide linker sequence is incorporated into the fusion protein using standard techniques well known in the art. Suitable peptide linker sequences may be chosen based on the following factors: (1) their ability to adopt a flexible extended conformation; (2) their inability to adopt a secondary structure that could interact with functional epitopes on the first and second polypeptides; and (3) the lack of hydrophobic or charged residues that might react with the polypeptide functional epitopes. Preferred peptide linker sequences contain Gly, Asn and Ser residues. Other near neutral amino acids, such as Thr and Ala may also be used in the linker sequence. Amino acid sequences which may be usefully employed as linkers include those disclosed in Maratea et al., Gene 40:39-46, 1985; Murphy et al., Proc. Natl. Acad. Sci. USA 83:8258-8262, 1986; U.S. Pat. No. 4,935,233 and U.S. Pat. No. 4,751,180. The linker sequence may generally be from 1 to about 50 amino acids in length. Linker sequences are not required when the first and second polypeptides have non-essential N-terminal amino acid regions that can be used to separate the functional domains and prevent steric interference.

[0367] The ligated DNA sequences are operably linked to suitable transcriptional or translational regulatory elements. The regulatory elements responsible for expression of DNA are located only 5′ to the DNA sequence encoding the first polypeptides. Similarly, stop codons required to end translation and transcription termination signals are only present 3′ to the DNA sequence encoding the second polypeptide.

[0368] Fusion proteins are also provided. Such proteins comprise a polypeptide as described herein together with an unrelated immunogenic protein. Preferably the immunogenic protein is capable of eliciting a recall response. Examples of such proteins include tetanus, tuberculosis and hepatitis proteins (see, for example, Stoute et al. New Engl. J. Med., 336:86-91, 1997).

[0369] Within preferred embodiments, an immunological fusion partner is derived from protein D, a surface protein of the gram-negative bacterium Haemophilus influenza B (WO 91/18926). Preferably, a protein D derivative comprises approximately the first third of the protein (e.g., the first N-terminal 100-110 amino acids), and a protein D derivative may be lipidated. Within certain preferred embodiments, the first 109 residues of a Lipoprotein D fusion partner is included on the N-terminus to provide the polypeptide with additional exogenous T-cell epitopes and to increase the expression level in E. coli (thus functioning as an expression enhancer). The lipid tail ensures optimal presentation of the antigen to antigen presenting cells. Other fusion partners include the non-structural protein from influenzae virus, NS1 (hemagglutinin). Typically, the N-terminal 81 amino acids are used, although different fragments that include T-helper epitopes may be used.

[0370] In another embodiment, the immunological fusion partner is the protein known as LYTA, or a portion thereof (preferably a C-terminal portion). LYTA is derived from Streptococcus pneumoniae, which synthesizes an N-acetyl-L-alanine amidase known as amidase LYTA (encoded by the LytA gene; Gene 43:265-292, 1986). LYTA is an autolysin that specifically degrades certain bonds in the peptidoglycan backbone. The C-terminal domain of the LYTA protein is responsible for the affinity to the choline or to some choline analogues such as DEAE. This property has been exploited for the development of E. coli C-LYTA expressing plasmids useful for expression of fusion proteins. Purification of hybrid proteins containing the C-LYTA fragment at the amino terminus has been described (see Biotechnology 10:795-798, 1992). Within a preferred embodiment, a repeat portion of LYTA may be incorporated into a fusion protein. A repeat portion is found in the C-terminal region starting at residue 178. A particularly preferred repeat portion incorporates residues 188-305.

[0371] In general, polypeptides (including fusion proteins) and polynucleotides as described herein are isolated. An “isolated” polypeptide or polynucleotide is one that is removed from its original environment For example, a naturally-occurring protein is isolated if it is separated from some or all of the coexisting materials in the natural system. Preferably, such polypeptides are at least about 90% pure, more preferably at least about 95% pure and most preferably at least about 99% pure. A polynucleotide is considered to be isolated if, for example, it is cloned into a vector that is not a part of the natural environment.

[0372] 4.20 Binding Agents

[0373] The present invention further employs agents, such as antibodies and antigen-binding fragments thereof, that specifically bind to a hematological malignancy-related antigen. As used herein, an antibody, or antigen-binding fragment thereof, is said to “specifically bind” to a hematological malignancy-related antigen if it reacts at a detectable level (within, for example, an ELISA) with, and does not react detectably with unrelated proteins under similar conditions. As used herein, “binding” refers to a noncovalent association between two separate molecules such that a complex is formed. The ability to bind may be evaluated by, for example, determining a binding constant for the formation of the complex. The binding constant is the value obtained when the concentration of the complex is divided by the product of the component concentrations. In general, two compounds are said to “bind,” in the context of the present invention, when the binding constant for complex formation exceeds about 10³ L/mol. The binding constant maybe determined using methods well known in the art.

[0374] Binding agents may be further capable of differentiating between patients with and without a hematological malignancy. Such binding agents generate a signal indicating the presence of a hematological malignancy in at least about 20% of patients with the disease, and will generate a negative signal indicating the absence of the disease in at least about 90% of individuals without the disease. To determine whether a binding agent satisfies this requirement, biological samples (e.g., blood, sera, urine and/or tumor biopsies) from patients with and without a hematological malignancy (as determined using standard clinical tests) may be assayed as described herein for the presence of polypeptides that bind to the binding agent. It will be apparent that a statistically significant number of samples with and without the disease should be assayed. Each binding agent should satisfy the above criteria; however, those of ordinary skill in the art will recognize that binding agents may be used in combination to improve sensitivity.

[0375] Any agent that satisfies the above requirements may be a binding agent. For example, a binding agent may be a ribosome, with or without a peptide component, an RNA molecule or a polypeptide. In a preferred embodiment, a binding agent is an antibody or an antigen-binding fragment thereof. Antibodies may be prepared by any of a variety of techniques known to those of ordinary skill in the art. See, e.g., Harlow and Lane, Antibodies: A Laboratory Manual, Cold Spring Harbor Laboratory, 1988. In general, antibodies can be produced by cell culture techniques, including the generation of monoclonal antibodies as described herein, or via transfection of antibody genes into suitable bacterial or mammalian cell hosts, in order to allow for the production of recombinant antibodies. In one technique, an immunogen comprising the polypeptide is initially injected into any of a wide variety of mammals (e.g., mice, rats, rabbits, sheep or goats). In this step, the polypeptides of this invention may serve as the immunogen without modification. Alternatively, particularly for relatively short polypeptides, a superior immune response may be elicited if the polypeptide is joined to a carrier protein, such as bovine serum albumin or keyhole limpet hemocyanin. The immunogen is injected into the animal host, preferably according to a predetermined schedule incorporating one or more booster immunizations, and the animals are bled periodically. Polyclonal antibodies specific for the polypeptide may then be purified from such antisera by, for example, affinity chromatography using the polypeptide coupled to a suitable solid support.

[0376] Monoclonal antibodies specific for an antigenic polypeptide of interest may be prepared, for example, using the technique of Kohler and Milstein, Eur. J. Immunol. 6:511-519, 1976, and improvements thereto. Briefly, these methods involve the preparation of immortal cell lines capable of producing antibodies having the desired specificity (i.e., reactivity with the polypeptide of interest). Such cell lines may be produced, for example, from spleen cells obtained from an animal immunized as described above. The spleen cells are then immortalized by, for example, fusion with a myeloma cell fusion partner, preferably one that is syngeneic with the immunized animal. A variety of fusion techniques may be employed. For example, the spleen cells and myeloma cells may be combined with a nonionic detergent for a few minutes and then plated at low density on a selective medium that supports the growth of hybrid cells, but not myeloma cells. A preferred selection technique uses HAT (hypoxanthine, aminopterin, thymidine) selection. After a sufficient time, usually about 1 to 2 weeks, colonies of hybrids are observed. Single colonies are selected and their culture supernatants tested for binding activity against the polypeptide. Hybridomas having high reactivity and specificity are preferred.

[0377] Monoclonal antibodies may be isolated from the supernatants of growing hybridoma colonies. In addition, various techniques may be employed to enhance the yield, such as injection of the hybridoma cell line into the peritoneal cavity of a suitable vertebrate host, such as a mouse. Monoclonal antibodies may then be harvested from the ascites fluid or the blood. Contaminants may be removed from the antibodies by conventional techniques, such as chromatography, gel filtration, precipitation, and extraction. The polypeptides of this invention may be used in the purification process in, for example, an affinity chromatography step.

[0378] Within certain embodiments, the use of antigen-binding fragments of antibodies may be preferred. Such fragments include Fab fragments, which may be prepared using standard techniques. Briefly, immunoglobulins may be purified from rabbit serum by affinity chromatography on Protein A bead columns (Harlow and Lane, Antibodies: A Laboratory Manual, Cold Spring Harbor Laboratory, 1988) and digested by papain to yield Fab and Fc fragments. The Fab and Fc fragments may be separated by affinity chromatography on protein A bead columns.

[0379] Monoclonal antibodies, and fragments thereof, of the present invention may be coupled to one or more therapeutic agents, such as radionuclides, differentiation inducers, drugs, toxins, and derivatives thereof. Preferred radionuclides include ⁹⁰Y, ¹²³I, ¹²⁵I, ¹³¹I, ¹⁸⁶Re, ¹⁸⁸Re, ²¹¹At, and ²¹²Bi. Preferred drugs include methotrexate, and pyrimidine and purine analogs. Preferred differentiation inducers include phorbol esters and butyric acid. Preferred toxins include ricin, abrin, diptheria toxin, cholera toxin, gelonin, Pseudomonas exotoxin, Shigella toxin, and pokeweed antiviral protein. For certain in vivo and ex vivo therapies, an antibody or fragment thereof is preferably coupled to a cytotoxic agent, such as a radioactive or chemotherapeutic moiety.

[0380] A therapeutic agent may be coupled (e.g., covalently bonded) to a suitable monoclonal antibody either directly or indirectly (e.g., via a linker group). A direct reaction between an agent and an antibody is possible when each possesses a substituent capable of reacting with the other. For example, a nucleophilic group, such as an amino or sulfhydryl group, on one may be capable of reacting with a carbonyl-containing group, such as an anhydride an acid halide, or with an alkyl group containing a good leaving group (e.g., a halide) on the other.

[0381] Alternatively, it may be desirable to couple a therapeutic agent and an antibody via a linker group. A linker group can function as a spacer to distance an antibody from an agent in order to avoid interference with binding capabilities. A linker group can also serve to increase the chemical reactivity of a substituent on an agent or an antibody, and thus increase the coupling efficiency. An increase in chemical reactivity may also facilitate the use of agents, or functional groups on agents, which otherwise would not be possible.

[0382] It will be evident to those skilled in the art that a variety of bifunctional or polyfunctional reagents, both homo- and hetero-functional (such as those described in the catalog of the Pierce Chemical Co., Rockford, Ill.), may be employed as the linker group. Coupling may be effected, for example, through amino groups, carboxyl groups, sulfhydryl groups or oxidized carbohydrate residues. There are numerous references describing such methodology, e.g., U.S. Pat. No. 4,671,958.

[0383] Where a therapeutic agent is more potent when free from the antibody portion of the immunoconjugates of the present invention, it may be desirable to use a linker group which is cleavable during or upon internalization into a cell. A number of different cleavable linker groups have been described. The mechanisms for the intracellular release of an agent from these linker groups include cleavage by reduction of a disulfide bond (e.g., U.S. Pat. No. 4,489,710), by irradiation of a photolabile bond (e.g., U.S. Pat. No. 4,625,014), by hydrolysis of derivatized amino acid side chains (e.g., U.S. Pat. No. 4,638,045), by serum complement-mediated hydrolysis (e.g., U.S. Pat. No. 4,671,958), and acid-catalyzed hydrolysis (e.g., U.S. Pat. No. 4,569,789).

[0384] It may be desirable to couple more than one agent to an antibody. In one embodiment, multiple molecules of an agent are coupled to one antibody molecule. In another embodiment, more than one type of agent may be coupled to one antibody. Regardless of the particular embodiment, immunoconjugates with more than one agent may be prepared in a variety of ways. For example, more than one agent may be coupled directly to an antibody molecule, or linkers which provide multiple sites for attachment can be used. Alternatively, a carrier can be used.

[0385] A carrier may bear the agents in a variety of ways, including covalent bonding either directly or via a linker group. Suitable carriers include proteins such as albumins (e.g., U.S. Pat. No. 4,507,234), peptides and polysaccharides such as aminodextran (e.g. U.S. Pat. No. 4,699,784). A carrier may also bear an agent by noncovalent bonding or by encapsulation, such as within a liposome vesicle (e.g., U.S. Pat. Nos. 4,429,008 and 4,873,088). Carriers specific for radionuclide agents include radiohalogenated small molecules and chelating compounds. For example, U.S. Pat. No. 4,735,792 discloses representative radiohalogenated small molecules and their synthesis. A radionuclide chelate may be formed from chelating compounds that include those containing nitrogen and sulfur atoms as the donor atoms for binding the metal, or metal oxide, radionuclide. For example, U.S. Pat. No. 4,673,562 discloses representative chelating compounds and their synthesis.

[0386] A variety of routes of administration for the antibodies and immunoconjugates may be used. Typically, administration will be intravenous, intramuscular, subcutaneous or in the bed of a resected tumor. It will be evident that the precise dose of the antibody/immunoconjugate will vary depending upon the antibody used, the antigen density on the tumor, and the rate of clearance of the antibody.

[0387] 4.21 Vaccines

[0388] In certain preferred embodiments of the present invention, vaccines are provided. The vaccines will generally comprise one or more pharmaceutical compositions, such as those discussed above, in combination with an immunostimulant. An immunostimulant may be any substance that enhances or potentiates an immune response (antibody and/or cell-mediated) to an exogenous antigen. Examples of immunostimulants include adjuvants, biodegradable microspheres (e.g., polylactic galactide) and liposomes (into which the compound is incorporated; see e.g., Fullerton, U.S. Pat. No. 4,235,877). Vaccine preparation is generally described in, for example, M. F. Powell and M. J. Newman, eds., “Vaccine Design (the subunit and adjuvant approach),” Plenum Press (NY, 1995). Pharmaceutical compositions and vaccines within the scope of the present invention may also contain other compounds, which may be biologically active or inactive. For example, one or more immunogenic portions of other tumor antigens may be present, either incorporated into a fusion polypeptide or as a separate compound, within the composition or vaccine.

[0389] Illustrative vaccines may contain DNA encoding one or more of the polypeptides as described above, such that the polypeptide is generated in situ. As noted above, the DNA may be present within any of a variety of delivery systems known to those of ordinary skill in the art, including nucleic acid expression systems, bacteria and viral expression systems. Numerous gene delivery techniques are well known in the art, such as those described by Rolland, Crit. Rev. Therap. Drug Carrier Systems 15:143-198, 1998, and references cited therein. Appropriate nucleic acid expression systems contain the necessary DNA sequences for expression in the patient (such as a suitable promoter and terminating signal). Bacterial delivery systems involve the administration of a bacterium (such as Bacillus-Calmette-Guerrin) that expresses an immunogenic portion of the polypeptide on its cell surface or secretes such an epitope. In a preferred embodiment, the DNA may be introduced using a viral expression system (e.g., vaccinia or other pox virus, retrovirus, or adenovirus), which may involve the use of a non-pathogenic (defective), replication competent virus. Suitable systems are disclosed, for example, in Fisher-Hoch et al., Proc. Natl. Acad. Sci. USA 86:317-321, 1989; Flexner et al., Ann. N.Y. Acad. Sci. 569:86-103, 1989; Flexner et al., Vaccine 8:17-21, 1990; U.S. Pat. Nos. 4,603,112, 4,769,330, and 5,017,487; WO 89/01973; U.S. Pat. No. 4,777,127; GB 2,200,651; EP 0,345,242; WO 91/02805; Berkner, Biotechniques 6:616-627, 1988; Rosenfeld et al., Science 252:431-434, 1991; Kolls et al., Proc. Natl. Acad. Sci. USA 91:215-219, 1994; Kass-Eisler et al., Proc. Natl. Acad. Sci. USA 90:11498-11502, 1993; Guzman et al., Circulation 88:2838-2848, 1993; and Guzman et al., Cir. Res. 73:1202-1207, 1993. Techniques for incorporating DNA into such expression systems are well known to those of ordinary skill in the art. The DNA may also be “naked,” as described, for example, in Ulmer et al., Science 259:1745-1749, 1993 and reviewed by Cohen, Science 259:1691-1692, 1993. The uptake of naked DNA may be increased by coating the DNA onto biodegradable beads, which are efficiently transported into the cells. It will be apparent that a vaccine may comprise both a polynucleotide and a polypeptide component. Such vaccines may provide for an enhanced immune response.

[0390] It will be apparent that a vaccine may contain pharmaceutically acceptable salts of the polynucleotides and polypeptides provided herein. Such salts may be prepared from pharmaceutically acceptable non-toxic bases, including organic bases (e.g., salts of primary, secondary and tertiary amines and basic amino acids) and inorganic bases (e.g. sodium, potassium, lithium, ammonium, calcium and magnesium salts).

[0391] While any suitable carrier known to those of ordinary skill in the art may be employed in the vaccine compositions of this invention, the type of carrier will vary depending on the mode of administration. Compositions of the present invention may be formulated for any appropriate manner of administration, including for example, topical, oral, nasal, intravenous, intracranial, intraperitoneal, subcutaneous or intramuscular administration. For parenteral administration, such as subcutaneous injection, the carrier preferably comprises water, saline, alcohol, a fat, a wax or a buffer. For oral administration, any of the above carriers or a solid carrier, such as mannitol, lactose, starch, magnesium stearate, sodium saccharine, talcum, cellulose, glucose, sucrose, and magnesium carbonate, may be employed. Biodegradable microspheres (e.g., polylactate polyglycolate) may also be employed as carriers for the pharmaceutical compositions of this invention Suitable biodegradable microspheres are disclosed, for example, in U.S. Pat. Nos. 4,897,268; 5,075,109; 5,928,647; 5,811,128; 5,820,883; 5,853,763; 5,814,344 and 5,942,252. One may also employ a carrier comprising the particulate-protein complexes described in U.S. Pat. No. 5,928,647, which are capable of inducing a class I-restricted cytotoxic T lymphocyte responses in a host.

[0392] Such compositions may also comprise buffers (e.g., neutral buffered saline or phosphate buffered saline), carbohydrates (e.g., glucose, mannose, sucrose or dextrans), mannitol, proteins, polypeptides or amino acids such as glycine, antioxidants, bacteriostats, chelating agents such as EDTA or glutathione, adjuvants (e.g., aluminum hydroxide), solutes that render the formulation isotonic, hypotonic or weakly hypertonic with the blood of a recipient, suspending agents, thickening agents and/or preservatives. Alternatively, compositions of the present invention may be formulated as a lyophilizate. Compounds may also be encapsulated within liposomes using well known technology.

[0393] Any of a variety of immunostimulants may be employed in the vaccines of this invention. For example, an adjuvant may be included. Most adjuvants contain a substance designed to protect the antigen from rapid catabolism, such as aluminum hydroxide or mineral oil, and a stimulator of immune responses, such as lipid A, Bortadella pertussis or Mycobacterium tuberculosis derived proteins. Suitable adjuvants are commercially available as, for example, Freund's Incomplete Adjuvant and Complete Adjuvant (Difco Laboratories, Detroit, Mich.); Merck Adjuvant 65 (Merck and Company, Inc., Rahway, N.J.); AS-2 (SmithKline Beecham, Philadelphia, Pa.); aluminum salts such as aluminum hydroxide gel (alum) or aluminum phosphate; salts of calcium, iron or zinc; an insoluble suspension of acylated tyrosine; acylated sugars; cationically or anionically derivatized polysaccharides; polyphosphazenes; biodegradable microspheres; monophosphoryl lipid A and quil A. Cytokines, such as GM-CSF or interleukin-2, -7, or -12, may also be used as adjuvants.

[0394] Within the vaccines provided herein, the adjuvant composition is preferably designed to induce an immune response predominantly of the Th1 type. High levels of Th1-type cytokines (e.g., IFN-γ, TNFα, IL-2 and IL-12) tend to favor the induction of cell mediated immune responses to an administered antigen. In contrast, high levels of Th2-type cytokines (e.g., IL-4, IL-5, IL-6 and IL-10) tend to favor the induction of humoral immune responses. Following application of a vaccine as provided herein, a patient will support an immune response that includes Th1- and Th2-type responses. Within a preferred embodiment, in which a response is predominantly Th1-type, the level of Th1-type cytokines will increase to a greater extent than the level of Th2-type cytokines. The levels of these cytokines may be readily assessed using standard assays. For a review of the families of cytokines, see Mosmann and Coffman, Ann. Rev. Immunol. 7:145-173, 1989.

[0395] Preferred adjuvants for use in eliciting a predominantly Th1-type response include, for example, a combination of monophosphoryl lipid A, preferably 3-de-O-acylated monophosphoryl lipid A (3D-MPL), together with an aluminum salt. MPL adjuvants are available from Corixa Corporation (Seattle, Wash.; see U.S. Pat. Nos. 4,436,727; 4,877,611; 4,866,034 and 4,912,094). CpG-containing oligonucleotides (in which the CpG dinucleotide is unmethylated) also induce a predominantly Th1 response. Such oligonucleotides are well known and are described, for example, in WO 96/02555, WO 99/33488 and U.S. Pat. Nos. 6,008,200 and 5,856,462. Immunostimulatory DNA sequences are also described, for example, by Sato et al., Science 273:352, 1996. Another preferred adjuvant is a saponin, preferably QS21 (Aquila Biopharmaceuticals Inc., Framingham, Mass.), which may be used alone or in combination with other adjuvants. For example, an enhanced system involves the combination of a monophosphoryl lipid A and saponin derivative, such as the combination of QS21 and 3D-MPL as described in WO 94/00153, or a less reactogenic composition where the QS21 is quenched with cholesterol, as described in WO 96/33739. Other preferred formulations comprise an oil-in-water emulsion and tocopherol. A particularly potent adjuvant formulation involving QS21, 3D-MPL and tocopherol in an oil-in-water emulsion is described in WO 95/17210.

[0396] Other preferred adjuvants include Montanide ISA 720 (Seppic, France), SAF (Chiron, California, United States), ISCOMS (CSL), MF-59 (Chiron), the SBAS series of adjuvants (e.g., SBAS-2 or SBAS-4, available from SmithKline Beecham, Rixensart, Belgium), Detox (Corixa, Hamilton, Mont.), RC-529 (Corixa, Hamilton, Mont.) and other aminoalkyl glucosaminide 4-phosphates (AGPs), such as those described in pending U.S. patent application Ser. Nos. 08/853,826 and 09/074,720, the disclosures of which are incorporated herein by reference in their entireties.

[0397] Any vaccine provided herein may be prepared using well known methods that result in a combination of antigen, immune response enhancer and a suitable carrier or excipient. The compositions described herein may be administered as part of a sustained release formulation (i.e., a formulation such as a capsule, sponge or gel (composed of polysaccharides, for example) that effects a slow release of compound following administration). Such formulations may generally be prepared using well known technology (see, e.g., Coombes et al., Vaccine 14:1429-1438, 1996) and administered by, for example, oral, rectal or subcutaneous implantation, or by implantation at the desired target site. Sustained-release formulations may contain a polypeptide, polynucleotide or antibody dispersed in a carrier matrix and/or contained within a reservoir surrounded by a rate controlling membrane.

[0398] Carriers for use within such formulations are biocompatible, and may also be biodegradable; preferably the formulation provides a relatively constant level of active component release. Such carriers include microparticles of poly(lactide-co-glycolide), polyacrylate, latex, starch, cellulose, dextran and the like. Other delayed-release carriers include supramolecular biovectors, which comprise a non-liquid hydrophilic core (e.g., a cross-linked polysaccharide or oligosaccharide) and, optionally, an external layer comprising an amphiphilic compound, such as a phospholipid (see e.g., U.S. Pat. No. 5,151,254 and PCT applications WO 94/20078, WO/94/23701 and WO 96/06638). The amount of active compound contained within a sustained release formulation depends upon the site of implantation, the rate and expected duration of release and the nature of the condition to be treated or prevented.

[0399] Any of a variety of delivery vehicles may be employed within pharmaceutical compositions and vaccines to facilitate production of an antigen-specific immune response that targets tumor cells. Delivery vehicles include antigen presenting cells (APCs), such as dendritic cells, macrophages, B cells, monocytes and other cells that may be engineered to be efficient APCs. Such cells may, but need not, be genetically modified to increase the capacity for presenting the antigen, to improve activation and/or maintenance of the T cell response, to have anti-tumor effects per se and/or to be immunologically compatible with the receiver (i.e., matched HLA haplotype). APCs may generally be isolated from any of a variety of biological fluids and organs, including tumor and peritumoral tissues, and may be autologous, allogeneic, syngeneic or xenogeneic cells.

[0400] Certain preferred embodiments of the present invention use dendritic cells or progenitors thereof as antigen-presenting cells. Dendritic cells are highly potent APCs (Banchereau and Steinman, Nature 392:245-251, 1998) and have been shown to be effective as a physiological adjuvant for eliciting prophylactic or therapeutic antitumor immunity (see Timmerman and Levy, Ann. Rev. Med. 50:507-529, 1999). In general, dendritic cells may be identified based on their typical shape (stellate in situ, with marked cytoplasmic processes (dendrites) visible in vitro), their ability to take up, process and present antigens with high efficiency and their ability to activate naïve T cell responses. Dendritic cells may, of course, be engineered to express specific cell-surface receptors or ligands that are not commonly found on dendritic cells in vivo or ex vivo, and such modified dendritic cells are contemplated by the present invention. As an alternative to dendritic cells, secreted vesicles antigen-loaded dendritic cells (called exosomes) may be used within a vaccine (see Zitvogel et al., Nature Med. 4:594-600, 1998).

[0401] Dendritic cells and progenitors may be obtained from peripheral blood, bone marrow, tumor-infiltrating cells, peritumoral tissues-infiltrating cells, lymph nodes, spleen, skin, umbilical cord blood or any other suitable tissue or fluid. For example, dendritic cells may be differentiated ex vivo by adding a combination of cytokines such as GM-CSF, IL-4, IL-13 and/or TNFα to cultures of monocytes harvested from peripheral blood. Alternatively, CD34 positive cells harvested from peripheral blood, umbilical cord blood or bone marrow may be differentiated into dendritic cells by adding to the culture medium combinations of GM-CSF, IL-3, TNFα, CD40 ligand, LPS, flt3 ligand and/or other compound(s) that induce differentiation, maturation and proliferation of dendritic cells.

[0402] Dendritic cells are conveniently categorized as “immature” and “mature” cells, which allows a simple way to discriminate between two well characterized phenotypes. However, this nomenclature should not be construed to exclude all possible intermediate stages of differentiation. Immature dendritic cells are characterized as APC with a high capacity for antigen uptake and processing, which correlates with the high expression of Fcγ receptor and mannose receptor. The mature phenotype is typically characterized by a lower expression of these markers, but a high expression of cell surface molecules responsible for T cell activation such as class I and class II MHC, adhesion molecules (e.g., CD54 and CD11) and costimulatory molecules (e.g., CD40, CD80, CD86 and 4-1BB).

[0403] APCs may generally be transfected with a polynucleotide encoding a hematological malignancy-related tumor protein (or portion or other variant thereof) such that the hematological malignancy-related tumor polypeptide, or an immunogenic portion thereof, is expressed on the cell surface. Such transfection may take place ex vivo, and a composition or vaccine comprising such transfected cells may then be used for therapeutic purposes, as described herein. Alternatively, a gene delivery vehicle that targets a dendritic or other antigen presenting cell may be administered to a patient, resulting in transfection that occurs in vivo. In vivo and ex vivo transfection of dendritic cells, for example, may generally be performed using any methods known in the art, such as those described in WO 97/24447, or the gene gun approach described by Mahvi et al., Immunology and cell Biology 75:456-460, 1997. Antigen loading of dendritic cells may be achieved by incubating dendritic cells or progenitor cells with the hematological malignancy-related tumor polypeptide, DNA (naked or within a plasmid vector) or RNA; or with antigen-expressing recombinant bacterium or viruses (e.g., vaccinia, fowlpox, adenovirus or lentivirus vectors). Prior to loading, the polypeptide may be covalently conjugated to an immunological partner that provides T cell help (e.g., a carrier molecule). Alternatively, a dendritic cell may be pulsed with a non-conjugated immunological partner, separately or in the presence of the polypeptide.

[0404] Vaccines and pharmaceutical compositions may be presented in unit-dose or multi-dose containers, such as sealed ampoules or vials. Such containers are preferably hermetically sealed to preserve sterility of the formulation until use. In general, formulations may be stored as suspensions, solutions or emulsions in oily or aqueous vehicles. Alternatively, a vaccine or pharmaceutical composition may be stored in a freeze-dried condition requiring only the addition of a sterile liquid carrier immediately prior to use.

[0405] 4.22 Cancer Therapy

[0406] In further aspects of the present invention, the compositions described herein may be used for immunotherapy of cancer, such as hematological malignancy. Within such methods, pharmaceutical compositions and vaccines are typically administered to a patient. As used herein, a “patient” refers to any warm-blooded animal, preferably a human. A patient may or may not be afflicted with cancer. Accordingly, the above pharmaceutical compositions and vaccines may be used to prevent the development of a cancer or to treat a patient afflicted with a cancer. A cancer may be diagnosed using criteria generally accepted in the art, including the presence of a malignant tumor. Pharmaceutical compositions and vaccines may be administered either prior to or following surgical removal of primary tumors and/or treatment such as administration of radiotherapy or conventional chemotherapeutic drugs. Administration may be by any suitable method, including administration by intravenous, intraperitoneal, intramuscular, subcutaneous, intranasal, intradermal, anal, vaginal, topical and oral routes.

[0407] Within certain embodiments, immunotherapy may be active immunotherapy, in which treatment relies on the in vivo stimulation of the endogenous host immune system to react against tumors with the administration of immune response-modifying agents (such as polypeptides and polynucleotides as provided herein).

[0408] Within other embodiments, immunotherapy may be passive immunotherapy, in which treatment involves the delivery of agents with established tumor-immune reactivity (such as effector cells or antibodies) that can directly or indirectly mediate antitumor effects and does not necessarily depend on an intact host immune system. Examples of effector cells include T cells as discussed above, T lymphocytes (such as CD8⁺ cytotoxic T lymphocytes and CD4⁺ T-helper tumor-infiltrating lymphocyte), killer cells (such as Natural Killer cells and lymphokine-activated killer cells), B cells and antigen-presenting cells (such as dendritic cells and macrophages) expressing a polypeptide provided herein. T cell receptors and antibody receptors specific for the polypeptides recited herein may be cloned, expressed and transferred into other vectors or effector cells for adoptive immunotherapy. The polypeptides provided herein may also be used to generate antibodies or anti-idiotypic antibodies (as described above and in U.S. Pat. No. 4,918,164) for passive immunotherapy.

[0409] Effector cells may generally be obtained in sufficient quantities for adoptive immunotherapy by growth in vitro, as described herein. Culture conditions for expanding single antigen-specific effector cells to several billion in number with retention of antigen recognition in vivo are well known in the art. Such in vitro culture conditions typically use intermittent stimulation with antigen, often in the presence of cytokines (such as IL-2) and non-dividing feeder cells. As noted above, immunoreactive polypeptides as provided herein may be used to rapidly expand antigen-specific T cell cultures in order to generate a sufficient number of cells for immunotherapy. In particular, antigen-presenting cells, such as dendritic, macrophage, monocyte, fibroblast and/or B cells, may be pulsed with immunoreactive polypeptides or transfected with one or more polynucleotides using standard techniques well known in the art. For example, antigen-presenting cells can be transfected with a polynucleotide having a promoter appropriate for increasing expression in a recombinant virus or other expression system. Cultured effector cells for use in therapy must be able to grow and distribute widely, and to survive long term in vivo. Studies have shown that cultured effector cells can be induced to grow in vivo and to survive long term in substantial numbers by repeated stimulation with antigen supplemented with IL-2 (see, for example, Cheever et al., Immunological Reviews 157:177, 1997).

[0410] Alternatively, a vector expressing a polypeptide recited herein may be introduced into antigen presenting cells taken from a patient and clonally propagated ex vivo for transplant back into the same patient. Transfected cells may be reintroduced into the patient using any means known in the art, preferably in sterile form by intravenous, intracavitary, intraperitoneal or intratumor administration.

[0411] Routes and frequency of administration of the therapeutic compositions described herein, as well as dosage, will vary from individual to individual, and may be readily established using standard techniques. In general, the pharmaceutical compositions and vaccines may be administered by injection (e.g., intracutaneous, intramuscular, intravenous or subcutaneous), intranasally (e.g., by aspiration) or orally. Preferably, between 1 and 10 doses may be administered over a 52 week period. Preferably, 6 doses are administered, at intervals of 1 month, and booster vaccinations may be given periodically thereafter. Alternate protocols may be appropriate for individual patients. A suitable dose is an amount of a compound that, when administered as described above, is capable of promoting an anti-tumor immune response, and is at least 10-50% above the basal (i.e., untreated) level. Such response can be monitored by measuring the anti-tumor antibodies in a patient or by vaccine-dependent generation of cytolytic effector cells capable of killing the patient's tumor cells in vitro. Such vaccines should also be capable of causing an immune response that leads to an improved clinical outcome (e.g., more frequent remissions, complete or partial or longer disease-free survival) in vaccinated patients as compared to non-vaccinated patients. In general, for pharmaceutical compositions and vaccines comprising one or more polypeptides, the amount of each polypeptide present in a dose ranges from about 25 μg to 5 mg per kg of host. Suitable dose sizes will vary with the size of the patient, but will typically range from about 0.1 mL to about 5 mL.

[0412] In general, an appropriate dosage and treatment regimen provides the active compound(s) in an amount sufficient to provide therapeutic and/or prophylactic benefit. Such a response can be monitored by establishing an improved clinical outcome (e.g., more frequent remissions, complete or partial, or longer disease-free survival) in treated patients as compared to non-treated patients. Increases in preexisting immune responses to a hematological malignancy-related tumor protein generally correlate with an improved clinical outcome. Such immune responses may generally be evaluated using standard proliferation, cytotoxicity or cytokine assays, which may be performed using samples obtained from a patient before and after treatment.

[0413] 4.23 Cancer Detection and Diagnosis

[0414] In general, a cancer may be detected in a patient based on the presence of one or more hematological malignancy-related tumor proteins and/or polynucleotides encoding such proteins in a biological sample (for example, blood, sera, sputum urine and/or tumor biopsies) obtained from the patient. In other words, such proteins may be used as markers to indicate the presence or absence of a cancer such as hematological malignancy. In addition, such proteins may be useful for the detection of other cancers. The binding agents provided herein generally permit detection of the level of antigen that binds to the agent in the biological sample. Polynucleotide primers and probes may be used to detect the level of mRNA encoding a tumor protein, which is also indicative of the presence or absence of a cancer. In general, a hematological malignancy-related tumor sequence should be present at a level that is at least three fold higher in tumor tissue than in normal tissue

[0415] There are a variety of assay formats known to those of ordinary skill in the art for using a binding agent to detect polypeptide markers in a sample. See, e.g., Harlow and Lane, Antibodies: A Laboratory Manual, Cold Spring Harbor Laboratory, 1988. In general, the presence or absence of a cancer in a patient may be determined by (a) contacting a biological sample obtained from a patient with a binding agent; (b) detecting in the sample a level of polypeptide that binds to the binding agent; and (c) comparing the level of polypeptide with a predetermined cut-off value.

[0416] In a preferred embodiment, the assay involves the use of binding agent immobilized on a solid support to bind to and remove the polypeptide from the remainder of the sample. The bound polypeptide may then be detected using a detection reagent that contains a reporter group and specifically binds to the binding agent/polypeptide complex. Such detection reagents may comprise, for example, a binding agent that specifically binds to the polypeptide or an antibody or other agent that specifically binds to the binding agent, such as an anti-immunoglobulin, protein G, protein A or a lectin. Alternatively, a competitive assay may be utilized, in which a polypeptide is labeled with a reporter group and allowed to bind to the immobilized binding agent after incubation of the binding agent with the sample. The extent to which components of the sample inhibit the binding of the labeled polypeptide to the binding agent is indicative of the reactivity of the sample with the immobilized binding agent. Suitable polypeptides for use within such assays include full length hematological malignancy-related tumor proteins and portions thereof to which the binding agent binds, as described above.

[0417] The solid support may be any material known to those of ordinary skill in the art to which the tumor protein may be attached. For example, the solid support may be a test well in a microtiter plate or a nitrocellulose or other suitable membrane. Alternatively, the support may be a bead or disc, such as glass, fiberglass, latex or a plastic material such as polystyrene or polyvinylchloride. The support may also be a magnetic particle or a fiber optic sensor, such as those disclosed, for example, in U.S. Pat. No. 5,359,681. The binding agent may be immobilized on the solid support using a variety of techniques known to those of skill in the art, which are amply described in the patent and scientific literature. In the context of the present invention, the term “immobilization” refers to both noncovalent association, such as adsorption, and covalent attachment (which may be a direct linkage between the agent and functional groups on the support or may be a linkage by way of a cross-liking agent). Immobilization by adsorption to a well in a microtiter plate or to a membrane is preferred. In such cases, adsorption may be achieved by contacting the binding agent, in a suitable buffer, with the solid support for a suitable amount of time. The contact time varies with temperature, but is typically between about 1 hour and about 1 day. In general, contacting a well of a plastic microtiter plate (such as polystyrene or polyvinylchloride) with an amount of binding agent ranging from about 10 ng to about 10 μg, and preferably about 100 ng to about 1 μg, is sufficient to immobilize an adequate amount of binding agent.

[0418] Covalent attachment of binding agent to a solid support may generally be achieved by first reacting the support with a bifunctional reagent that will react with both the support and a functional group, such as a hydroxyl or amino group, on the binding agent. For example, the binding agent may be covalently attached to supports having an appropriate polymer coating using benzoquinone or by condensation of an aldehyde group on the support with an amine and an active hydrogen on the binding partner (see, e.g., Pierce Immunotechnology Catalog and Handbook, 1991, at A12-A13).

[0419] In certain embodiments, the assay is a two-antibody sandwich assay. This assay may be performed by first contacting an antibody that has been immobilized on a solid support, commonly the well of a microtiter plate, with the sample, such that polypeptides within the sample are allowed to bind to the immobilized antibody. Unbound sample is then removed from the immobilized polypeptide-antibody complexes and a detection reagent (preferably a second antibody capable of binding to a different site on the polypeptide) containing a reporter group is added. The amount of detection reagent that remains bound to the solid support is then determined using a method appropriate for the specific reporter group.

[0420] More specifically, once the antibody is immobilized on the support as described above, the remaining protein binding sites on the support are typically blocked. Any suitable blocking agent known to those of ordinary skill in the art, such as bovine serum albumin or Tween 20™ (Sigma Chemical Co., St. Louis, Mo.). The immobilized antibody is then incubated with the sample, and polypeptide is allowed to bind to the antibody. The sample may be diluted with a suitable diluent, such as phosphate-buffered saline (PBS) prior to incubation. In general, an appropriate contact time (i.e., incubation time) is a period of time that is sufficient to detect the presence of polypeptide within a sample obtained from an individual with hematological malignancy. Preferably, the contact time is sufficient to achieve a level of binding that is at least about 95% of that achieved at equilibrium between bound and unbound polypeptide. Those of ordinary skill in the art will recognize that the time necessary to achieve equilibrium may be readily determined by assaying the level of binding that occurs over a period of time. At room temperature, an incubation time of about 30 minutes is generally sufficient.

[0421] Unbound sample may then be removed by washing the solid support with an appropriate buffer, such as PBS containing 0.1% Tween 20™. The second antibody, which contains a reporter group, may then be added to the solid support. Preferred reporter groups include those groups recited above.

[0422] The detection reagent is then incubated with the immobilized antibody-polypeptide complex for an amount of time sufficient to detect the bound polypeptide. An appropriate amount of time may generally be determined by assaying the level of binding that occurs over a period of time. Unbound detection reagent is then removed and bound detection reagent is detected using the reporter group. The method employed for detecting the reporter group depends upon the nature of the reporter group. For radioactive groups, scintillation counting or autoradiographic methods are generally appropriate. Spectroscopic methods may be used to detect dyes, luminescent groups and fluorescent groups. Biotin may be detected using avidin, coupled to a different reporter group (commonly a radioactive or fluorescent group or an enzyme). Enzyme reporter groups may generally be detected by the addition of substrate (generally for a specific period of time), followed by spectroscopic or other analysis of the reaction products.

[0423] To determine the presence or absence of a cancer, such as hematological malignancy, the signal detected from the reporter group that remains bound to the solid support is generally compared to a signal that corresponds to a predetermined cut-off value. In one preferred embodiment, the cut-off value for the detection of a cancer is the average mean signal obtained when the immobilized antibody is incubated with samples from patients without the cancer. In general, a sample generating a signal that is three standard deviations above the predetermined cut-off value is considered positive for the cancer. In an alternate preferred embodiment, the cut-off value is determined using a Receiver Operator Curve, according to the method of Sackett et al., Clinical Epidemiology: A Basic Science for Clinical Medicine, Little Brown and Co., 1985, p. 106-7. Briefly, in this embodiment, the cut-off value may be determined from a plot of pairs of true positive rates (i.e., sensitivity) and false positive rates (100%-specificity) that correspond to each possible cut-off value for the diagnostic test result. The cut-off value on the plot that is the closest to the upper left-hand corner (i.e., the value that encloses the largest area) is the most accurate cut-off value, and a sample generating a signal that is higher than the cut-off value determined by this method may be considered positive. Alternatively, the cut-off value may be shifted to the left along the plot, to minimize the false positive rate, or to the right, to minimize the false negative rate. In general, a sample generating a signal that is higher than the cut-off value determined by this method is considered positive for a cancer.

[0424] In a related embodiment, the assay is performed in a flow-through or strip test format, wherein the binding agent is immobilized on a membrane, such as nitrocellulose. In the flow-through test, polypeptides within the sample bind to the immobilized binding agent as the sample passes through the membrane. A second, labeled binding agent then binds to the binding agent-polypeptide complex as a solution containing the second binding agent flows through the membrane. The detection of bound second binding agent may then be performed as described above. In the strip test format, one end of the membrane to which binding agent is bound is immersed in a solution containing the sample. The sample migrates along the membrane through a region containing second binding agent and to the area of immobilized binding agent. Concentration of second binding agent at the area of immobilized antibody indicates the presence of a cancer. Typically, the concentration of second binding agent at that site generates a pattern, such as a line, that can be read visually. The absence of such a pattern indicates a negative result. In general, the amount of binding agent immobilized on the membrane is selected to generate a visually discernible pattern when the biological sample contains a level of polypeptide that would be sufficient to generate a positive signal in the two-antibody sandwich assay, in the format discussed above. Preferred binding agents for use in such assays are antibodies and antigen-binding fragments thereof. Preferably, the amount of antibody immobilized on the membrane ranges from about 25 ng to about 1 μg, and more preferably from about 50 ng to about 500 ng. Such tests can typically be performed with a very small amount of biological sample.

[0425] Of course, numerous other assay protocols exist that are suitable for use with the tumor proteins or binding agents of the present invention. The above descriptions are intended to be exemplary only. For example, it will be apparent to those of ordinary skill in the art that the above protocols may be readily modified to use hematological malignancy-related tumor polypeptides to detect antibodies that bind to such polypeptides in a biological sample. The detection of such hematological malignancy-related tumor protein specific antibodies may correlate with the presence of a cancer.

[0426] A cancer may also, or alternatively, be detected based on the presence of T cells that specifically react with a hematological malignancy-related tumor protein in a biological sample. Within certain methods, a biological sample comprising CD4⁺ and/or CD8⁺ T cells isolated from a patient is incubated with a hematological malignancy-related tumor polypeptide, a polynucleotide encoding such a polypeptide and/or an APC that expresses at least an immunogenic portion of such a polypeptide, and the presence or absence of specific activation of the T cells is detected. Suitable biological samples include, but are not limited to, isolated T cells. For example, T cells may be isolated from a patient by routine techniques (such as by Ficoll/Hypaque density gradient centrifugation of peripheral blood lymphocytes). T cells may be incubated in vitro for 2-9 days (typically 4 days) at 37° C. with polypeptide (e.g., 5-25 μg/ml). It may be desirable to incubate another aliquot of a T cell sample in the absence of hematological malignancy-related tumor polypeptide to serve as a control. For CD4⁺ T cells, activation is preferably detected by evaluating proliferation of the T cells. For CD8⁺ T cells, activation is preferably detected by evaluating cytolytic activity. A level of proliferation that is at least two fold greater and/or a level of cytolytic activity that is at least 20% greater than in disease-free patients indicates the presence of a cancer in the patient.

[0427] As noted above, a cancer may also, or alternatively, be detected based on the level of mRNA encoding a hematological malignancy-related tumor protein in a biological sample. For example, at least two oligonucleotide primers may be employed in a polymerase chain reaction (PCR) based assay to amplify a portion of a hematological malignancy-related tumor cDNA derived from a biological sample, wherein at least one of the oligonucleotide primers is specific for (i.e., hybridizes to) a polynucleotide encoding the hematological malignancy-related tumor protein. The amplified cDNA is then separated and detected using techniques well known in the art, such as gel electrophoresis. Similarly, oligonucleotide probes that specifically hybridize to a polynucleotide encoding a hematological malignancy-related tumor protein may be used in a hybridization assay to detect the presence of polynucleotide encoding the tumor protein in a biological sample.

[0428] To permit hybridization under assay conditions, oligonucleotide primers and probes should comprise an oligonucleotide sequence that has at least about 60%, preferably at least about 75% and more preferably at least about 90%, identity to a portion of a polynucleotide encoding a hematological malignancy-related tumor protein that is at least 10 nucleotides, and preferably at least 20 nucleotides, in length. Preferably, oligonucleotide primers and/or probes hybridize to a polynucleotide encoding a polypeptide described herein under moderately stringent conditions, as defined above. Oligonucleotide primers and/or probes which may be usefully employed in the diagnostic methods described herein preferably are at least 10-40 nucleotides in length. In a preferred embodiment, the oligonucleotide primers comprise at least 10 contiguous nucleotides, more preferably at least 15 contiguous nucleotides, of a DNA molecule having a sequence disclosed in this application. Techniques for both PCR based assays and hybridization assays are well known in the art (see, for example, Mullis et al., Cold Spring Harbor Symp. Quant. Biol., 51:263, 1987; Erlich ed., PCR Technology, Stockton Press, NY, 1989).

[0429] One preferred assay employs RT-PCR, in which PCR is applied in conjunction with reverse transcription. Typically, RNA is extracted from a biological sample, such as biopsy tissue, and is reverse transcribed to produce cDNA molecules. PCR amplification using at least one specific primer generates a cDNA molecule, which may be separated and visualized using, for example, gel electrophoresis. Amplification may be performed on biological samples taken from a test patient and from an individual who is not afflicted with a cancer. The amplification reaction may be performed on several dilutions of cDNA spanning two orders of magnitude. A two-fold or greater increase in expression in several dilutions of the test patient sample as compared to the same dilutions of the non-cancerous sample is typically considered positive.

[0430] In another embodiment, the compositions described herein may be used as markers for the progression of cancer. In this embodiment, assays as described above for the diagnosis of a cancer may be performed over time, and the change in the level of reactive polypeptide(s) or polynucleotide(s) evaluated. For example, the assays may be performed every 24-72 hours for a period of 6 months to 1 year, and thereafter performed as needed. In general, a cancer is progressing in those patients in whom the level of polypeptide or polynucleotide detected increases over time. In contrast, the cancer is not progressing when the level of reactive polypeptide or polynucleotide either remains constant or decreases with time.

[0431] Certain in vivo diagnostic assays may be performed directly on a tumor. One such assay involves contacting tumor cells with a binding agent. The bound binding agent may then be detected directly or indirectly via a reporter group. Such binding agents may also be used in histological applications. Alternatively, polynucleotide probes may be used within such applications.

[0432] As noted above, to improve sensitivity, multiple hematological malignancy-related tumor protein markers may be assayed within a given sample. It will be apparent that binding agents specific for different proteins provided herein may be combined within a single assay. Further, multiple primers or probes may be used concurrently. The selection of tumor protein markers may be based on routine experiments to determine combinations that results in optimal sensitivity. In addition, or alternatively, assays for tumor proteins provided herein may be combined with assays for other known tumor antigens.

[0433] 4.24 Preparation of DNA Sequences

[0434] Certain nucleic acid sequences of cDNA molecules encoding portions of hematological malignancy-related antigens were isolated by PCR™-based subtraction. This technique serves to normalize differentially expressed cDNAs, facilitating the recovery of rare transcripts, and also has the advantage of permitting enrichment of cDNAs with small amounts of polyA RNA material and without multiple rounds of hybridization. To obtain antigens overexpressed in non-Hodgkin's lymphomas, two subtractions were performed with a tester library prepared from a pool of three T cell non-Hodgkin's lymphoma mRNAs. The two libraries were independently subtracted with different pools of driver cDNAs. Driver #1 contained cDNA prepared from specific normal tissues (lymph node, bone marrow, T cells, heart and brain), and this subtraction generated the library TCS-D1 (cell non-Hodgkin's lymphoma subtracted library with driver #1). Driver #2 contained non-specific normal tissues (colon, large intestine, lung, pancreas, spinal cord, skeletal muscle, liver, kidney, skin and brain), and this subtraction generated the library TCS-D2 (T cell non-Hodgkin's lymphoma subtraction library with driver #2). Two other subtractions were performed with a tester library prepared from a pool of three B cell non-Hodgkin's lymphoma mRNAs. The two libraries were independently subtracted with different pools of driver cDNAs. Driver #1 contained cDNA prepared from specific normal tissues (lymph node, bone marrow, B cells, heart and brain), and this subtraction generated the library BCNHL/D1 (B cell non-Hodgkin's lymphoma subtracted library with driver #1). Driver #2 contained non-specific normal tissues (brain, lung, pancreas, spinal cord, skeletal muscle, colon, spleen, large intestine and PBMC), and this subtraction generated the library BCNHL/D2 (B cell non-Hodgkin's lymphoma subtraction library with driver #2). PCR™-amplified pools were generated from the subtracted libraries and clones were sequenced. Hematological malignancy-related antigen sequences may be further characterized using any of a variety of well known techniques. For example, PCR™ amplified clones may be arrayed onto glass slides for microarray analysis. To determine tissue distribution, the arrayed clones may be used as targets to be hybridized with different first strand cDNA probes, including lymphoma probes, leukemia probes and probes from different normal tissues. Leukemia and lymphoma probes may be generated from cryopreserved samples obtained at the time of diagnosis from NHL, Hodgkin's disease, AML, CML, CLL, ALL, MDS and myeloma patients with poor outcome (patients who failed to achieve complete remission following conventional chemotherapy or relapsed) or good outcome (patients who achieved long term remission). To analyze gene expression during hematopoetic differentiation, probes may be generated from >95% pure fractions of CD34+, CD2+, CD14+, CD15+ and CD19+ cells derived from healthy individuals.

[0435] Polynucleotide variants may generally be prepared by any method known in the art, including chemical synthesis by, for example, solid phase phosphoramidite chemical synthesis. Modifications in a polynucleotide sequence may also be introduced using standard mutagenesis techniques, such as oligonucleotide-directed site-specific mutagenesis (see Adelman et al., DNA 2:183, 1983). Alternatively, RNA molecules may be generated by in vitro or in vivo transcription of DNA sequences, provided that the DNA is incorporated into a vector with a suitable RNA polymerase promoter (such as T7 or SP6). Certain portions may be used to prepare an encoded polypeptide, as described herein. In addition, or alternatively, a portion may be administered to a patient such that the encoded polypeptide is generated in vivo (e.g. by transfecting antigen-presenting cells, such as dendritic cells, with a cDNA construct encoding a hematological malignancy-related antigen, and administering the transfected cells to the patient).

[0436] A portion of a sequence complementary to a coding sequence (i.e., an antisense polynucleotide) may also be used as a probe or to modulate hematological malignancy-related antigen expression. cDNA constructs that can be transcribed into antisense RNA may also be introduced into cells or tissues to facilitate the production of antisense RNA. An antisense polynucleotide may be used, as described herein, to inhibit expression of a hematological malignancy-related antigen. Antisense technology can be used to control gene expression through triple-helix formation, which compromises the ability of the double helix to open sufficiently for the binding of polymerases, transcription factors or regulatory molecules (see Gee et al., In Huber and Carr, Molecular and Immunologic Approaches, Futura Publishing Co. (Mt. Kisco, N.Y.; 1994)). Alternatively, an antisense molecule may be designed to hybridize with a control region of a gene (e.g., promoter, enhancer or transcription initiation site), and block transcription of the gene; or to block translation by inhibiting binding of a transcript to ribosomes.

[0437] A portion of a coding sequence or of a complementary sequence may also be designed as a probe or primer to detect gene expression. Probes may be labeled with a variety of reporter groups, such as radionuclides and enzymes, and are preferably at least 10 nucleotides in length, more preferably at least 20 nucleotides in length and still more preferably at least 30 nucleotides in length. Primers, as noted above, are preferably 22-30 nucleotides in length.

[0438] Any polynucleotide may be further modified to increase stability in vivo. Possible modifications include, but are not limited to, the addition of flanking sequences at the 5′ and/or 3′ ends; the use of phosphorothioate or 2′ O-methyl rather than phosphodiesterase linkages in the backbone; and/or the inclusion of nontraditional bases such as inosine, queosine and wybutosine, as well as acetyl- methyl-, thio- and other modified forms of adenine, cytidine, guanine, thymine and uridine.

[0439] Hematological malignancy-related antigen polynucleotides may be joined to a variety of other nucleotide sequences using established recombinant DNA techniques. For example, a polynucleotide may be cloned into any of a variety of cloning vectors, including plasmids, phagemids, lambda phage derivatives and cosmids. Vectors of particular interest include expression vectors, replication vectors, probe generation vectors and sequencing vectors. In general, a vector will contain an origin of replication functional in at least one organism, convenient restriction endonuclease sites and one or more selectable markers. Other elements will depend upon the desired use, and will be apparent to those of ordinary skill in the art.

[0440] Within certain embodiments, polynucleotides may be formulated so as to permit entry into a cell of a mammal, and expression therein. Such formulations are particularly useful for therapeutic purposes, as described below. Those of ordinary skill in the art will appreciate that there are many ways to achieve expression of a polynucleotide in a target cell, and any suitable method may be employee For example, a polynucleotide may be incorporated into a viral vector such as, but not limited to, adenovirus, adeno-associated virus, retrovirus, or vaccinia or other pox virus (e.g., avian pox virus). Techniques for incorporating DNA into such vectors are well known to those of ordinary skill in the art. A retroviral vector may additionally transfer or incorporate a gene for a selectable marker (to aid in the identification or selection of transduced cells) and/or a targeting moiety, such as a gene that encodes a ligand for a receptor on a specific target cell, to render the vector target specific. Targeting may also be accomplished using an antibody, by methods known to those of ordinary skill in the art.

[0441] Other formulations for therapeutic purposes include colloidal dispersion systems, such as macromolecule complexes, nanocapsules, microspheres, beads, and lipid-based systems including oil-in-water emulsions, micelles, mixed micelles, and liposomes. A preferred colloidal system for use as a delivery vehicle in vitro and in vivo is a liposome (i.e., an artificial membrane vesicle). The preparation and use of such systems is well known in the art.

[0442] 4.25 Therapeutic Methods

[0443] In further aspects of the present invention, the compositions described herein may be used for immunotherapy of hematological malignancies including adult and pediatric AML, CML, ALL, CLL, myelodysplastic syndromes (MDS), myeloproliferative syndromes (MPS), secondary leukemia, multiple myeloma, Hodgkin's lymphoma and Non-Hodgkin's lymphomas. In addition, compositions described herein may be used for therapy of diseases associated with an autoimmune response against hematopoetic precursor cells, such as severe aplastic anemia.

[0444] Immunotherapy may be performed using any of a variety of techniques, in which compounds or cells provided herein function to remove hematological malignancy-related antigen-expressing cells from a patient. Such removal may take place as a result of enhancing or inducing an immune response in a patient specific for hematological malignancy-related antigen or a cell expressing hematological malignancy-related antigen. Alternatively, hematological malignancy-related antigen-expressing cells may be removed ex vivo (e.g., by treatment of autologous bone marrow, peripheral blood or a fraction of bone marrow or peripheral blood). Fractions of bone marrow or peripheral blood may be obtained using any standard technique in the art.

[0445] Within such methods, pharmaceutical compositions and vaccines are typically administered to a patient. As used herein, a “patient” refers to any warm-blooded animal, preferably a human. A patient may or may not be afflicted with a hematological malignancy. Accordingly, the above pharmaceutical compositions and vaccines may be used to prevent the development of a malignancy or to treat a patient afflicted with a malignancy. A hematological malignancy may be diagnosed using criteria generally accepted in the art. Pharmaceutical compositions and vaccines may be administered either prior to or following surgical removal of primary tumors and/or treatment such as administration of radiotherapy or conventional chemotherapeutic drugs, or bone marrow transplantation (autologous, allogeneic or syngeneic).

[0446] Within certain embodiments, immunotherapy may be active immunotherapy, in which treatment relies on the in vivo stimulation of the endogenous host immune system to react against tumors with the administration of immune response-modifying agents (such as polypeptides and polynucleotides as provided herein).

[0447] Within other embodiments, immunotherapy may be passive immunotherapy, in which treatment involves the delivery of agents with established tumor-immune reactivity (such as effector cells or antibodies) that can directly or indirectly mediate antitumor effects and does not necessarily depend on an intact host immune system. Examples of effector cells include T cells as discussed above, T lymphocytes (such as CD8⁺ cytotoxic T lymphocytes and CD4⁺ T-helper tumor-infiltrating lymphocytes), killer cells (such as Natural Killer cells and lymphokine-activated killer cells), B cells and antigen-presenting cells (such as dendritic cells and macrophages) expressing a polypeptide provided herein. T cell receptors and antibody receptors specific for the polypeptides recited herein may be cloned, expressed and transferred into other vectors or effector cells for adoptive immunotherapy. The polypeptides provided herein may also be used to generate antibodies or anti-idiotypic antibodies (as described above and in U.S. Pat. No. 4,918,164) for passive immunotherapy.

[0448] Effector cells may generally be obtained in sufficient quantities for adoptive immunotherapy by growth in vitro, as described herein. Culture conditions for expanding single antigen-specific effector cells to several billion in number with retention of antigen recognition in vivo are well known in the art. Such in vitro culture conditions typically use intermittent stimulation with antigen, often in the presence of cytokines (such as IL-2) and non-dividing feeder cells. As noted above, immunoreactive polypeptides as provided herein may be used to rapidly expand antigen-specific T cell cultures in order to generate a sufficient number of cells for immunotherapy. In particular, antigen-presenting cells, such as dendritic, macrophage or B cells, may be pulsed with immunoreactive polypeptides or transfected with one or more polynucleotides using standard techniques well known in the art. For example, antigen-presenting cells can be transfected with a polynucleotide having a promoter appropriate for increasing expression in a recombinant virus or other expression system. Cultured effector cells for use in therapy must be able to grow and distribute widely, and to survive long term in vivo. Studies have shown that cultured effector cells can be induced to grow in vivo and to survive long term in substantial numbers by repeated stimulation with antigen supplemented with IL-2 (see, for example, Cheever et al., Immunological Reviews 157:177, 1997).

[0449] Alternatively, a vector expressing a polypeptide recited herein may be introduced into antigen presenting cells taken from a patient and clonally propagated ex vivo for transplant back into the same patient. Transfected cells may be reintroduced into the patient using any means known in the art, preferably in sterile form by intravenous, intracavitary, intraperitoneal or intratumor administration.

[0450] The compositions provided herein may be used alone or in combination with conventional therapeutic regimens such as surgery, irradiation, chemotherapy and/or bone marrow transplantation (autologous, syngeneic, allogeneic or unrelated). As discussed in greater detail below, binding agents and T cells as provided herein may be used for purging of autologous stem cells. Such purging may be beneficial prior to, for example, bone marrow transplantation or transfusion of blood or components thereof. Binding agents, T cells, antigen presenting cells (APC) and compositions provided herein may further be used for expanding and stimulating (or priming) autologous, allogeneic, syngeneic or unrelated hematological malignancy-related antigen-specific T-cells in vitro and/or in vivo. Such hematological malignancy-related antigen-specific T cells may be used, for example, within donor lymphocyte infusions.

[0451] Routes and frequency of administration of the therapeutic compositions described herein, as well as dosage, will vary from individual to individual, and may be readily established using standard techniques. In general, the pharmaceutical compositions and vaccines may be administered by injection (e.g., intracutaneous, intramuscular, intravenous or subcutaneous), intranasally (e.g., by aspiration) or orally. Preferably, between 1 and 10 doses may be administered over a 52 week period. Preferably, 6 doses are administered, at intervals of 1 month, and booster vaccinations may be given periodically thereafter. Alternate protocols may be appropriate for individual patients. A suitable dose is an amount of a compound that, when administered as described above, is capable of promoting an anti-tumor immune response, and is at least 10-50% above the basal (i.e., untreated) level. Such response can be monitored by measuring the anti-tumor antibodies in a patient or by vaccine-dependent generation of cytolytic effector cells capable of killing the patient's tumor cells in vitro. Such vaccines should also be capable of causing an immune response that leads to an improved clinical outcome (e.g. more frequent remissions, complete or partial or longer disease-free survival) in vaccinated patients as compared to non-vaccinated patients. In general, for pharmaceutical compositions and vaccines comprising one or more polypeptides, the amount of each polypeptide present in a dose ranges from about 100 μg to 5 mg per kg of host. Suitable dose sizes will vary with the size of the patient, but will typically range from about 0.1 mL to about 5 mL.

[0452] In general, an appropriate dosage and treatment regimen provides the active compound(s) in an amount sufficient to provide therapeutic and/or prophylactic benefit. Such a response can be monitored by establishing an improved clinical outcome (e.g., more frequent remissions, complete or partial, or longer disease-free survival) in treated patients as compared to non-treated patients. Increases in preexisting immune responses to a hematological malignancy-related antigen generally correlate with an improved clinical outcome. Such immune responses may generally be evaluated using standard proliferation, cytotoxicity or cytokine assays, which may be performed using samples obtained from a patient before and after treatment.

[0453] Within further aspects, methods for inhibiting the development of a malignant disease associated with hematological malignancy-related antigen expression involve the administration of autologous T cells that have been activated in response to a hematological malignancy-related antigen polypeptide or hematological malignancy-related antigen-expressing APC, as described above. Such T cells may be CD4⁺ and/or CD8⁺, and may be proliferated as described above. The T cells may be administered to the individual in an amount effective to inhibit the development of a malignant disease. Typically, about 1×10⁹ to 1×10¹¹ T cells/M² are administered intravenously, intracavitary or in the bed of a resected tumor. It will be evident to those skilled in the art that the number of cells and the frequency of administration will be dependent upon the response of the patient.

[0454] Within certain embodiments, T cells may be stimulated prior to an autologous bone marrow transplantation. Such stimulation may take place in vivo or in vitro. For in vitro stimulation, bone marrow and/or peripheral blood (or a fraction of bone marrow or peripheral blood) obtained from a patient may be contacted with a hematological malignancy-related antigen polypeptide, a polynucleotide encoding a hematological malignancy-related antigen polypeptide and/or an APC that expresses a hematological malignancy-related antigen polypeptide under conditions and for a time sufficient to permit the stimulation of T cells as described above. Bone marrow, peripheral blood stem cells and/or hematological malignancy-related antigen-specific T cells may then be administered to a patient using standard techniques.

[0455] Within related embodiments, T cells of a related or unrelated donor may be stimulated prior to a syngeneic or allogeneic (related or unrelated) bone marrow transplantation. Such stimulation may take place in vivo or in vitro. For in vitro stimulation, bone marrow and/or peripheral blood (or a fraction of bone marrow or peripheral blood) obtained from a related or unrelated donor may be contacted with a hematological malignancy-related antigen polypeptide, hematological malignancy-related antigen polynucleotide and/or APC that expresses a hematological malignancy-related antigen polypeptide under conditions and for a time sufficient to permit the stimulation of T cells as described above. Bone marrow, peripheral blood stem cells and/or hematological malignancy-related antigen-specific T cells may then be administered to a patient using standard techniques.

[0456] Within other embodiments, hematological malignancy-related antigen-specific T cells, antibodies or antigen-binding fragments thereof as described herein may be used to remove cells expressing hematological malignancy-related antigen from a biological sample, such as autologous bone marrow, peripheral blood or a fraction of bone marrow or peripheral blood (e.g., CD34⁺ enriched peripheral blood (PB) prior to administration to a patient). Such methods may be performed by contacting the biological sample with such T cells, antibodies or antibody fragments under conditions and for a time sufficient to permit the reduction of hematological malignancy-related antigen expressing cells to less than 10%, preferably less than 5% and more preferably less than 1%, of the total number of myeloid or lymphatic cells in the bone marrow or peripheral blood. Such contact may be achieved, for example, using a column to which antibodies are attached using standard techniques. Antigen-expressing cells are retained on the column. The extent to which such cells have been removed may be readily determined by standard methods such as, for example, qualitative and quantitative PCR analysis, morphology, immunohistochemistry and FACS analysis. Bone marrow or PB (or a fraction thereof) may then be administered to a patient using standard techniques.

[0457] 4.26 Diagnostic Methods

[0458] In general, a hematological malignancy may be detected in a patient based on the presence of hematological malignancy-related antigen and/or polynucleotide in a biological sample (such as blood, sera, urine and/or tumor biopsies) obtained from the patient. In other words, hematological malignancy-related antigens may be used as a marker to indicate the presence or absence of such a malignancy. The binding agents provided herein generally permit detection of the level of antigen that binds to the agent in the biological sample. Polynucleotide primers and probes may be used to detect the level of mRNA encoding hematological malignancy-related antigen, which is also indicative of the presence or absence of a hematological malignancy. In general, hematological malignancy-related antigen should be present at a level that is at least three fold higher in a sample obtained from a patient afflicted with a hematological malignancy than in the sample obtained from an individual not so afflicted.

[0459] There are a variety of assay formats known to those of ordinary skill in the art for using a binding agent to detect polypeptide markers in a sample. See, e.g., Harlow and Lane, Antibodies: A Laboratory Manual, Cold Spring Harbor Laboratory, 1988. In general, the presence or absence of a hematological malignancy in a patient may be determined by (a) contacting a biological sample obtained from a patient with a binding agent; (b) detecting in the sample a level of polypeptide that binds to the binding agent; and (c) comparing the level of polypeptide with a predetermined cut-off value.

[0460] In a preferred embodiment, the assay involves the use of binding agent immobilized on a solid support to bind to and remove the polypeptide from the remainder of the sample. The bound polypeptide may then be detected using a detection reagent that contains a reporter group and specifically binds to the binding agent/polypeptide complex. Such detection reagents may comprise, for example, a binding agent that specifically binds to the polypeptide or an antibody or other agent that specifically binds to the binding agent, such as an anti-immunoglobulin, protein G, protein A or a lectin. Alternatively, a competitive assay may be utilized, in which a polypeptide is labeled with a reporter group and allowed to bind to the immobilized binding agent after incubation of the binding agent with the sample. The extent to which components of the sample inhibit the binding of the labeled polypeptide to the binding agent is indicative of the reactivity of the sample with the immobilized binding agent. Suitable polypeptides for use within such assays include full length hematological malignancy-related antigens and portions thereof to which the binding agent binds, as described above.

[0461] The solid support may be any material known to those of ordinary skill in the art to which the hematological malignancy-related antigen polypeptide may be attached. For example, the solid support may be a test well in a microtiter plate or a nitrocellulose or other suitable membrane. Alternatively, the support may be a bead or disc, such as glass, fiberglass, latex or a plastic material such as polystyrene or polyvinylchloride. The support may also be a magnetic particle or a fiber optic sensor, such as those disclosed, for example, in U.S. Pat. No. 5,359,681. The binding agent may be immobilized on the solid support using a variety of techniques known to those of skill in the art, which are amply described in the patent and scientific literature. In the context of the present invention, the term “immobilization” refers to both noncovalent association, such as adsorption, and covalent attachment (which may be a direct linkage between the agent and functional groups on the support or may be a linkage by way of a cross-linking agent). Immobilization by adsorption to a well in a microtiter plate or to a membrane is preferred. In such cases, adsorption may be achieved by contacting the binding agent, in a suitable buffer, with the solid support for a suitable amount of time. The contact time varies with temperature, but is typically between about 1 hour and about 1 day. In general, contacting a well of a plastic microtiter plate (such as polystyrene or polyvinylchloride) with an amount of binding agent ranging from about 10 ng to about 10 μg, and preferably about 100 ng to about 1 μg, is sufficient to immobilize an adequate amount of binding agent.

[0462] Covalent attachment of binding agent to a solid support may generally be achieved by first reacting the support with a bifunctional reagent that will react with both the support and a functional group, such as a hydroxyl or amino group, on the binding agent. For example, the binding agent may be covalently attached to supports having an appropriate polymer coating using benzoquinone or by condensation of an aldehyde group on the support with an amine and an active hydrogen on the binding partner (see, e.g., Pierce Immunotechnology Catalog and Handbook, 1991, at A12-A13).

[0463] In certain embodiments, the assay is a two-antibody sandwich assay. This assay may be performed by first contacting an antibody that has been immobilized on a solid support, commonly the well of a microtiter plate, with the sample, such that polypeptides within the sample are allowed to bind to the immobilized antibody. Unbound sample is then removed from the immobilized polypeptide-antibody complexes and a detection reagent (preferably a second antibody capable of binding to a different site on the polypeptide) containing a reporter group is added. The amount of detection reagent that remains bound to the solid support is then determined using a method appropriate for the specific reporter group.

[0464] More specifically, once the antibody is immobilized on the support as described above, the remaining protein binding sites on the support are typically blocked. Any suitable blocking agent known to those of ordinary skill in the art, such as bovine serum albumin or Tween 20™ (Sigma Chemical Co., St. Louis, Mo.). The immobilized antibody is then incubated with the sample, and polypeptide is allowed to bind to the antibody. The sample may be diluted with a suitable diluent, such as phosphate-buffered saline (PBS) prior to incubation. In general, an appropriate contact time (i.e., incubation time) is a period of time that is sufficient to detect the presence of polypeptide within a sample obtained from an individual with a hematological malignancy. Preferably, the contact time is sufficient to achieve a level of binding that is at least about 95% of that achieved at equilibrium between bound and unbound polypeptide. Those of ordinary skill in the art will recognize that the time necessary to achieve equilibrium may be readily determined by assaying the level of binding that occurs over a period of time. At room temperature, an incubation time of about 30 minutes is generally sufficient.

[0465] Unbound sample may then be removed by washing the solid support with an appropriate buffer, such as PBS containing 0.1% Tween 20™. The second antibody, which contains a reporter group, may then be added to the solid support. Preferred reporter groups include those groups recited above.

[0466] The detection reagent is then incubated with the immobilized antibody-polypeptide complex for an amount of time sufficient to detect the bound polypeptide. An appropriate amount of time may generally be determined by assaying the level of binding that occurs over a period of time. Unbound detection reagent is then removed and bound detection reagent is detected using the reporter group. The method employed for detecting the reporter group depends upon the nature of the reporter group. For radioactive groups, scintillation counting or autoradiographic methods are generally appropriate. Spectroscopic methods may be used to detect dyes, luminescent groups and fluorescent groups. Biotin may be detected using avidin, coupled to a different reporter group (commonly a radioactive or fluorescent group or an enzyme). Enzyme reporter groups may generally be detected by the addition of substrate (generally for a specific period of time), followed by spectroscopic or other analysis of the reaction products.

[0467] To determine the presence or absence of a hematological malignancy, the signal detected from the reporter group that remains bound to the solid support is generally compared to a signal that corresponds to a predetermined cut-off value. In one preferred embodiment, the cut-off value for the detection of a hematological malignancy is the average mean signal obtained when the immobilized antibody is incubated with samples from patients without the malignancy. In general, a sample generating a signal that is three standard deviations above the predetermined cut-off value is considered positive for the malignancy. In an alternate preferred embodiment, the cut-off value is determined using a Receiver Operator Curve, according to the method of Sackett et al., Clinical Epidemiology: A Basic Science for Clinical Medicine, Little Brown and Co., 1985, p. 106-7. Briefly, in this embodiment, the cut-off value may be determined from a plot of pairs of true positive rates (i.e., sensitivity) and false positive rates (100%-specificity) that correspond to each possible cut-off value for the diagnostic test result. The cut-off value on the plot that is the closest to the upper left-hand corner (i.e., the value that encloses the largest area) is the most accurate cut-off value, and a sample generating a signal that is higher than the cut-off value determined by this method may be considered positive. Alternatively, the cut-off value may be shifted to the left along the plot, to minimize the false positive rate, or to the right, to minimize the false negative rate. In general, a sample generating a signal that is higher than the cut-off value determined by this method is considered positive for a malignancy.

[0468] In a related embodiment, the assay is performed in a flow-through or strip test format, wherein the binding agent is immobilized on a membrane, such as nitrocellulose. In the flow-through test, polypeptides within the sample bind to the immobilized binding agent as the sample passes through the membrane. A second, labeled binding agent then binds to the binding agent-polypeptide complex as a solution containing the second binding agent flows through the membrane. The detection of bound second binding agent may then be performed as described above. In the strip test format, one end of the membrane to which binding agent is bound is immersed in a solution containing the sample. The sample migrates along the membrane through a region containing second binding agent and to the area of immobilized binding agent. Concentration of second binding agent at the area of immobilized antibody indicates the presence of a hematological malignancy. Typically, the concentration of second binding agent at that site generates a pattern, such as a line, that can be read visually. The absence of such a pattern indicates a negative result. In general, the amount of binding agent immobilized on the membrane is selected to generate a visually discernible pattern when the biological sample contains a level of polypeptide that would be sufficient to generate a positive signal in the two-antibody sandwich assay, in the format discussed above. Preferred binding agents for use in such assays are antibodies and antigen-binding fragments thereof. Preferably, the amount of antibody immobilized on the membrane ranges from about 25 ng to about 1 μg, and more preferably from about 50 ng to about 500 ng. Such tests can typically be performed with a very small amount of biological sample.

[0469] Of course, numerous other assay protocols exist that are suitable for use with the hematological malignancy-related antigen sequences or binding agents of the present invention. The above descriptions are intended to be exemplary only. For example, it will be apparent to those of ordinary skill in the art that the above protocols may be readily modified to use hematological malignancy-related antigen polypeptides to detect antibodies that bind to such polypeptides in a biological sample. The detection of hematological malignancy-related antigen-specific antibodies may correlate with the presence of a hematological.

[0470] A malignancy may also, or alternatively, be detected based on the presence of T cells that specifically react with hematological malignancy-related antigen in a biological sample. Within certain methods, a biological sample comprising CD4⁺ and/or CD8⁺ T cells isolated from a patient is incubated with a hematological malignancy-related antigen polypeptide, a polynucleotide encoding such a polypeptide and/or an APC that expresses such a polypeptide, and the presence or absence of specific activation of the T cells is detected. Suitable biological samples include, but are not limited to, isolated T cells. For example, T cells may be isolated from a patient by routine techniques (such as by Ficoll/Hypaque density gradient centrifugation of peripheral blood lymphocytes). T cells may be incubated in vitro for 2-9 days (typically 4 days) at 37° C. with Mtb-81 or Mtb-67.2 polypeptide (e.g., 5-25 μg/ml). It may be desirable to incubate another aliquot of a T cell sample in the absence of hematological malignancy-related antigen polypeptide to serve as a control. For CD4⁺ T cells, activation is preferably detected by evaluating proliferation of the T cells. For CD8⁺ T cells, activation is preferably detected by evaluating cytolytic activity. A level of proliferation that is at least two fold greater and/or a level of cytolytic activity that is at least 20% greater than in disease-free patients indicates the presence of a hematological malignancy in the patient.

[0471] As noted above, a hematological malignancy may also, or alternatively, be detected based on the level of mRNA encoding hematological malignancy-related antigen in a biological sample. For example, at least two oligonucleotide primers may be employed in a polymerase chain reaction (PCR) based assay to amplify a portion of hematological malignancy-related antigen cDNA derived from a biological sample, wherein at least one of the oligonucleotide primers is specific for (i.e., hybridizes to) a polynucleotide encoding the hematological malignancy-related antigen protein. The amplified cDNA is then separated and detected using techniques well known in the art, such as gel electrophoresis. Similarly, oligonucleotide probes that specifically hybridize to a polynucleotide encoding hematological malignancy-related antigen may be used in a hybridization assay to detect the presence of polynucleotide encoding hematological malignancy-related antigen in a biological sample.

[0472] To permit hybridization under assay conditions, oligonucleotide primers and probes should comprise an oligonucleotide sequence that has at least about 60%, preferably at least about 75% and more preferably at least about 90%, identity to a portion of a polynucleotide encoding hematological malignancy-related antigen that is at least 10 nucleotides, and preferably at least 20 nucleotides, in length. Preferably, oligonucleotide primers and/or probes hybridize to a polynucleotide encoding a polypeptide described herein under moderately stringent conditions, as defined above. Oligonucleotide primers and/or probes which may be usefully employed in the diagnostic methods described herein preferably are at least 10-40 nucleotides in length. Techniques for both PCR based assays and hybridization assays are well known in the art (see, for example, Mullis et al., Cold Spring Harbor Symp. Quant. Biol., 51:263, 1987; Erlich ed., PCR Technology, Stockton Press, NY, 1989).

[0473] One preferred assay employs RT-PCR, in which PCR is applied in conjunction with reverse transcription. Typically, RNA is extracted from a biological sample such as a biopsy tissue and is reverse transcribed to produce cDNA molecules. PCR amplification using at least one specific primer generates a cDNA molecule, which may be separated and visualized using, for example, gel electrophoresis. Amplification may be performed on biological samples taken from a test patient and from an individual who is not afflicted with a hematological malignancy. The amplification reaction may be performed on several dilutions of cDNA spanning two orders of magnitude. A two-fold or greater increase in expression in several dilutions of the test patient sample as compared to the same dilutions of the sample from a normal individual is typically considered positive.

[0474] In preferred embodiments, such assays may be performed using samples enriched for cells expressing the hematological malignancy-related antigen(s) of interest. Such enrichment may be achieved, for example, using a binding agent as provided herein to remove the cells from the remainder of the biological sample. The removed cells may then be assayed as described above for biological samples.

[0475] In further embodiments, hematological malignancy-related antigens may be used as markers for monitoring disease progression or the response to therapy of a hematological malignancy. In this embodiment, assays as described above for the diagnosis of a hematological malignancy may be performed over time, and the change in the level of reactive polypeptide(s) evaluated. For example, the assays may be performed every 24-72 hours for a period of 6 months to 1 year, and thereafter performed as needed. In general, a malignancy is progressing in those patients in whom the level of polypeptide detected by the binding agent increases over time. In contrast, the malignancy is not progressing when the level of reactive polypeptide either remains constant or decreases with time.

[0476] Certain in vivo diagnostic assays may be performed directly on a tumor. One such assay involves contacting tumor cells with a binding agent. The bound binding agent may then be detected directly or indirectly via a reporter group. Such binding agents may also be used in histological applications. Alternatively, polynucleotide probes may be used within such applications.

[0477] As noted above, to improve sensitivity, multiple markers may be assayed within a given sample. It will be apparent that binding agents specific for different proteins provided herein may be combined within a single assay. Further, multiple primers or probes may be used concurrently. The selection of markers may be based on routine experiments to determine combinations that results in optimal sensitivity.

[0478] Further diagnostic applications include the detection of extramedullary disease (e.g., cerebral infiltration of blasts in leukemias). Within such methods, a binding agent may be coupled to a tracer substance, and the diagnosis is performed in vivo using well known techniques. Coupled binding agent may be administered as described above, and extramedullary disease may be detected based on assaying the presence of tracer substance. Alternatively, a tracer substance may be associated with a T cell specific for hematological malignancy-related antigen, permitting detection of extramedullary disease based on assays to detect the location of the tracer substance.

[0479] 4.27 Exemplary Definitions

[0480] In accordance with the present invention, nucleic acid sequences include, but are not limited to, DNAs (including and not limited to genomic or extragenomic DNAs), genes, peptide nucleic acids (PNAs) RNAs (including, but not limited to, rRNAs, mRNAs and tRNAs), nucleosides, and suitable nucleic acid segments either obtained from native sources, chemically synthesized, modified, or otherwise prepared in whole or in part by the hand of man.

[0481] Unless defined otherwise, all technical and scientific terms used herein have the same meaning as commonly understood by one of ordinary skill in the art to which this invention belongs. Although any methods and compositions similar or equivalent to those described herein can be used in the practice or testing of the present invention, the preferred methods and compositions are described herein. For purposes of the present invention, the following terms are defined below:

[0482] A, an: In accordance with long standing patent law convention, the words “a” and “an” when used in this application, including the claims, denotes “one or more”.

[0483] Expression: The combination of intracellular processes, including transcription and translation undergone by a polynucleotide such as a structural gene to synthesize the encoded peptide or polypeptide.

[0484] Promoter: a term used to generally describe the region or regions of a nucleic acid sequence that regulates transcription.

[0485] Regulatory Element: a term used to generally describe the region or regions of a nucleic acid sequence that regulates transcription.

[0486] Structural gene: A gene or sequence region that is expressed to produce an encoded peptide or polypeptide.

[0487] Transformation: A process of introducing an exogenous polynucleotide sequence (e.g., a vector, a recombinant DNA or RNA molecule) into a host cell or protoplast in which that exogenous nucleic acid segment is incorporated into at least a first chromosome or is capable of autonomous replication within the transformed host cell. Transfection, electroporation, and naked nucleic acid uptake all represent examples of techniques used to transform a host cell with one or more polynucleotides.

[0488] Transformed cell: A host cell whose nucleic acid complement has been altered by the introduction of one or more exogenous polynucleotides into that cell.

[0489] Transgenic cell: Any cell derived or regenerated from a transformed cell or derived from a transgenic cell, or from the progeny or offspring of any generation of such a transformed host cell.

[0490] Transgenic animal: An animal or a progeny or an offspring of any generation thereof that is derived from a transformed animal cell, wherein the animal's DNA contains an introduced exogenous nucleic acid molecule not originally present in a native, wild type, non-transgenic animal of the same species. The terms “transgenic animal” and “transformed animal” have sometimes been used in the art as synonymous terms to define an animal, the genetic contents of which has been modified to contain one or more exogenous nucleic acid segments.

[0491] Vector: A nucleic acid molecule, typically comprised of DNA, capable of replication in a host cell and/or to which another nucleic acid segment can be operatively linked so as to bring about replication of the attached segment. A plasmid, cosmid, or a virus is an exemplary vector.

[0492] The terms “substantially corresponds to”, “substantially homologous”, or “substantial identity” as used herein denotes a characteristic of a nucleic acid or an amino acid sequence, wherein a selected nucleic acid or amino acid sequence has at least about 70 or about 75 percent sequence identity as compared to a selected reference nucleic acid or amino acid sequence. More typically, the selected sequence and the reference sequence will have at least about 76, 77, 78, 79, 80, 81, 82, 83, 84 or even 85 percent sequence identity, and more preferably at least about 86, 87, 88, 89, 90, 91, 92, 93, 94, or 95 percent sequence identity. More preferably still, highly homologous sequences often share greater than at least about 96, 97, 98, or 99 percent sequence identity between the selected sequence and the reference sequence to which it was compared. The percentage of sequence identity may be calculated over the entire length of the sequences to be compared, or may be calculated by excluding small deletions or additions which total less than about 25 percent or so of the chosen reference sequence. The reference sequence may be a subset of a larger sequence, such as a portion of a gene or flanking sequence, or a repetitive portion of a chromosome. However, in the case of sequence homology of two or more polynucleotide sequences, the reference sequence will typically comprise at least about 18-25 nucleotides, more typically at least about 26 to 35 nucleotides, and even more typically at least about 40, 50, 60, 70, 80, 90, or even 100 or so nucleotides. Desirably, which highly homologous fragments are desired, the extent of percent identity between the two sequences will be at least about 80%, preferably at least about 85%, and more preferably about 90% or 95% or higher, as readily determined by one or more of the sequence comparison algorithms well-known to those of skill in the art, such as e.g., the FASTA program analysis described by Pearson and Lipman (1988).

[0493] The term “naturally occurring” as used herein as applied to an object refers to the fact that an object can be found in nature. For example, a polypeptide or polynucleotide sequence that is present in an organism (including viruses) that can be isolated from a source in nature and which has not been intentionally modified by the hand of man in a laboratory is naturally-occurring. As used herein, laboratory strains of rodents that may have been selectively bred according to classical genetics are considered naturally occurring animals.

[0494] As used herein, a “heterologous” is defined in relation to a predetermined referenced gene sequence. For example, with respect to a structural gene sequence, a heterologous promoter is defined as a promoter which does not naturally occur adjacent to the referenced structural gene, but which is positioned by laboratory manipulation. Likewise, a heterologous gene or nucleic acid segment is defined as a gene or segment that does not naturally occur adjacent to the referenced promoter and/or enhancer elements.

[0495] “Transcriptional regulatory element” refers to a polynucleotide sequence that activates transcription alone or in combination with one or more other nucleic acid sequences. A transcriptional regulatory element can, for example, comprise one or more promoters, one or more response elements, one or more negative regulatory elements, and/or one or more enhancers.

[0496] As used herein, a “transcription factor recognition site” and a “transcription factor binding site” refer to a polynucleotide sequence(s) or sequence motif(s) which are identified as being sites for the sequence-specific interaction of one or more transcription factors, frequently taking the form of direct protein-DNA binding. Typically, transcription factor binding sites can be identified by DNA footprinting, gel mobility shift assays, and the like, and/or can be predicted on the basis of known consensus sequence motifs, or by other methods known to those of skill in the art.

[0497] As used herein, the term “operably linked” refers to a linkage of two or more polynucleotides or two or more nucleic acid sequences in a functional relationship. A nucleic acid is “operably linked” when it is placed into a functional relationship with another nucleic acid sequence. For instance, a promoter or enhancer is operably linked to a coding sequence if it affects the transcription of the coding sequence. Operably linked means that the DNA sequences being linked are typically contiguous and, where necessary to join two protein coding regions, contiguous and in reading frame. However, since enhancers generally function when separated from the promoter by several kilobases and intronic sequences may be of variable lengths, some polynucleotide elements may be operably linked but not contiguous.

[0498] “Transcriptional unit” refers to a polynucleotide sequence that comprises at least a first structural gene operably linked to at least a first cis-acting promoter sequence and optionally linked operably to one or more other cis-acting nucleic acid sequences necessary for efficient transcription of the structural gene sequences, and at least a first distal regulatory element as may be required for the appropriate tissue-specific and developmental transcription of the structural gene sequence operably positioned under the control of the promoter and/or enhancer elements, as well as any additional cis sequences that are necessary for efficient transcription and translation (e.g., polyadenylation site(s), mRNA stability controlling sequence(s), etc.

[0499] As noted above, the present invention is generally directed to compositions and methods for using the compositions, for example in the therapy and diagnosis of cancer, such as hematological malignancy. Certain illustrative compositions described herein include hematological malignancy-related tumor polypeptides, polynucleotides encoding such polypeptides, binding agents such as antibodies, antigen presenting cells (APCs) and/or immune system cells (e.g., T cells). A “hematological malignancy-related tumor protein,” as the term is used herein, refers generally to a protein that is expressed in hematologic malignancy-related tumor cells at a level that is at least two fold, and preferably at least five fold, greater than the level of expression in a normal tissue, as determined using a representative assay provided herein. Certain hematological malignancy-related tumor proteins are tumor proteins that react detectably (within an immunoassay, such as an ELISA or Western blot) with antisera of a patient afflicted with hematological malignancy.

[0500] 4.28 Biological Functional Equivalents

[0501] Modification and changes may be made in the structure of the polynucleotides and peptides of the present invention and still obtain a functional molecule that encodes a peptide with desirable characteristics, or still obtain a genetic construct with the desirable expression specificity and/or properties. As it is often desirable to introduce one or more mutations into a specific polynucleotide sequence, various means of introducing mutations into a polynucleotide or peptide sequence known to those of skill in the art may be employed for the preparation of heterologous sequences that may be introduced into the selected cell or animal species. In certain circumstances, the resulting encoded peptide sequence is altered by this mutation, or in other cases, the sequence of the peptide is unchanged by one or more mutations in the encoding polynucleotide. In other circumstances, one or more changes are introduced into the promoter and/or enhancer regions of the polynucleotide constructs to alter the activity, or specificity of the expression elements and thus alter the expression of the heterologous therapeutic nucleic acid segment operably positioned under the control of the elements.

[0502] When it is desirable to alter the amino acid sequence of one or more of the heterologous peptides encoded by the expression construct to create an equivalent, or even an improved, second-generation molecules, the amino acid changes may be achieved by changing one or more of the codons of the encoding DNA sequence, according to Table 1.

[0503] For example, certain amino acids may be substituted for other amino acids in a protein structure without appreciable loss of interactive binding capacity with structures such as, for example, antigen-binding regions of antibodies or binding sites on substrate molecules. Since it is the interactive capacity and nature of a protein that defines that protein's biological functional activity, certain amino acid sequence substitutions can be made in a protein sequence, and, of course, its underlying DNA coding sequence, and nevertheless obtain a protein with like properties. It is thus contemplated by the inventors that various changes may be made in the peptide sequences of the disclosed compositions, or corresponding DNA sequences which encode said peptides without appreciable loss of their biological utility or activity.

TABLE 1

| Amino Acids | | | Codons | | | | | |
|---|---|---|---|---|---|---|---|---|
| Alanine | Ala | A | GCA | GCC | GCG | GCU | | |
| Cysteine | Cys | C | UGC | UGU | | | | |
| Aspartic acid | Asp | D | GAC | GAU | | | | |
| Glutamic acid | Glu | E | GAA | GAG | | | | |
| Phenylalanine | Phe | F | UUC | UUU | | | | |
| Glycine | Gly | G | GGA | GGC | GGG | GGU | | |
| Histidine | His | H | CAC | CAU | | | | |
| Isoleucine | Ile | I | AUA | AUC | AUU | | | |
| Lysine | Lys | K | AAA | AAG | | | | |
| Leucine | Leu | L | UUA | UUG | CUA | CUC | CUG | CUU |
| Methionine | Met | M | AUG | | | | | |
| Asparagine | Asn | N | AAC | AAU | | | | |
| Proline | Pro | P | CCA | CCC | CCG | CCU | | |
| Glutamine | Gln | Q | CAA | CAG | | | | |
| Arginine | Arg | R | AGA | AGG | CGA | CGC | CGG | CGU |
| Serine | Ser | S | AGC | AGU | UCA | UCC | UCG | UCU |
| Threonine | Thr | T | ACA | ACC | ACG | ACU | | |
| Valine | Val | V | GUA | GUC | GUG | GUU | | |
| Tryptophan | Trp | W | UGG | | | | | |
| Tyrosine | Tyr | Y | UAC | UAU | | | | |

[0504] In making such changes, the hydropathic index of amino acids may be considered. The importance of the hydropathic amino acid index in conferring interactive biologic function on a protein is generally understood in the art (Kyte and Doolittle, 1982, incorporate herein by reference). It is accepted that the relative hydropathic character of the amino acid contributes to the secondary structure of the resultant protein, which in turn defines the interaction of the protein with other molecules, for example, enzymes, substrates, receptors, DNA, antibodies, antigens, and the like. Each amino acid has been assigned a hydropathic index on the basis of their hydrophobicity and charge characteristics (Kyte and Doolittle, 1982), these are: isoleucine (+4.5); valine (+4.2); leucine (+3.8); phenylalanine (+2.8); cysteine/cystine (+2.5); methionine (+1.9); alanine (+1.8); glycine (−0.4); threonine (−0.7); serine (−0.8); tryptophan (−0.9); tyrosine (−1.3); proline (−1.6); histidine (−3.2); glutamate (−3.5); glutamine (−3.5); aspartate (−3.5); asparagine (−3.5); lysine (−3.9); and arginine (4.5).

[0505] It is known in the art that certain amino acids may be substituted by other amino acids having a similar hydropathic index or score and still result in a protein with similar biological activity, i.e. still obtain a biological functionally equivalent protein. In making such changes, the substitution of amino acids whose hydropathic indices are within ±2 is preferred, those that are within ±1 are particularly preferred, and those within ±0.5 are even more particularly preferred. It is also understood in the art that the substitution of like amino acids can be made effectively on the basis of hydrophilicity. U.S. Pat. No. 4,554,101, incorporated herein by reference, states that the greatest local average hydrophilicity of a protein, as governed by the hydrophilicity of its adjacent amino acids, correlates with a biological property of the protein.

[0506] As detailed in U.S. Pat. No. 4,554,101, the following hydrophilicity values have been assigned to amino acid residues: arginine (+3.0); lysine (+3.0); aspartate (+3.0±1); glutamate (+3.0±1); serine (+0.3); asparagine (+0.2); glutamine (+0.2); glycine (0); threonine (−0.4); proline (−0.5±1); alanine (−0.5); histidine (−0.5); cysteine (−1.0); methionine (−1.3); valine (−1.5); leucine (−1.8); isoleucine (−1.8); tyrosine (−2.3); phenylalanine (−2.5); tryptophan (−3.4). It is understood that an amino acid can be substituted for another having a similar hydrophilicity value and still obtain a biologically equivalent, and in particular, an immunologically equivalent protein. In such changes, the substitution of amino acids whose hydrophilicity values are within ±2 is preferred, those that are within ±1 are particularly preferred, and those within ±0.5 are even more particularly preferred.

[0507] As outlined above, amino acid substitutions are generally therefore based on the relative similarity of the amino acid side-chain substituents, for example, their hydrophobicity, hydrophilicity, charge, size, and the like. Exemplary substitutions which take several of the foregoing characteristics into consideration are well known to those of skill in the art and include: arginine and lysine; glutamate and aspartate; serine and threonine; glutamine and asparagine; and valine, leucine and isoleucine.

### 5. EXAMPLES

[0508] The following examples are included to demonstrate preferred embodiments of the invention. However, those of skill in the art should, in light of the present disclosure, appreciate that many changes can be made in the specific embodiments which are disclosed and still obtain a like or similar result without departing from the spirit and scope of the invention described in the appended claims.

### 5.1 Example 1

### Identification of Hematological Malignancy-Related Antigen Polynucleotides

[0509] This Example illustrates the identification of hematological malignancy-related antigen polynucleotides from non-Hodgkin's lymphomas.

[0510] Hematological malignancy-related antigen polynucleotides were isolated by PCR-based subtraction. PolyA mRNA was prepared from T cell non-Hodgkin's lymphomas, B cell non-Hodgkin's lymphomas and normal tissues. Six cDNA libraries were constructed, PCR-subtracted and analyzed. Two libraries were constructed using pools of three T cell non-Hodgkin's lymphoma mRNAs (referred to herein as TCS libraries). Two others were constructed using pools of three B cell non-Hodgkin's lymphoma mRNAs (referred to herein as BCNHL libraries). Two other libraries were constructed using a pool of 2 Hodgkin's lymphoma mRNAs (referred to herein as HLS libraries. cDNA synthesis, hybridization and PCR amplification were performed according to Clontech's user manual (PCR-Select cDNA Subtraction), with the following changes: 1) cDNA was restricted with a mixture of enzymes, including MscI, PvuII, StuI and DraI, instead of the single enzyme RsaI; and 2) the ratio of driver to tester cDNA was increased in the hybridization steps (to 76:1) to give a more stringent subtraction.

[0511] The two TCS libraries were independently subtracted with different pools of driver cDNAs. Driver #1 contained cDNA prepared from specific normal tissues (lymph node, bone marrow, T cells, heart and brain), and this subtraction generated the library TCS-D1 (T cell non-Hodgkin's lymphoma subtracted library with driver #1). Driver #2 contained non-specific normal tissues (colon, large intestine, lung, pancreas, spinal cord, skeletal muscle, liver, kidney, skin and brain), and this subtraction generated the library TCS-D2 (T cell non-Hodgkin's lymphoma subtraction library with driver #2).

[0512] Similarly, the two BCNHL libraries were independently subtracted with different pools of driver cDNAs. Driver #1 contained cDNA prepared from specific normal tissues (lymph node, bone marrow, B cells, heart and brain), and this subtraction generated the library BCNHL/D1 (B cell non-Hodgkin's lymphoma subtracted library with driver #1). Driver #2 contained non-specific normal tissues (brain, lung, pancreas, spinal cord, skeletal muscle, colon, spleen, large intestine and PBMC), and this subtraction generated the library BCNHL/D2 (B cell non-Hodgkin's lymphoma subtraction library with driver #2).

[0513] The two HLS libraries were independently subtracted with different pools of driver cDNAs. Driver #1 contained cDNA prepared from specific normal tissues (lymph node, bone marrow, B cells and lung) and this subtraction generated HLS-D1 (Hodgkin's lymphoma subtraction library with driver #1). Driver #2 contained non-specific normal tissues (colon, large intestine, lung, pancreas, spinal cord, skeletal muscle, liver, kidney, skin and brain) and this generated the library HLS-D2 (Hodgkin's lymphoma subtraction library with driver #2).

[0514] To analyze the efficiency of the subtraction, actin (a housekeeping gene) was PCR amplified from dilutions of subtracted as well as unsubtracted PCR samples. Furthermore, the complexity and redundancy of each library was characterized by sequencing 96 clones from each of the PCR subtraction libraries (TCS-D1, TCS-D2, BCNHL/D1, BCNHL/D2, HLS-D1 and HLS-D2). These analyses indicated that the libraries are enriched for genes overexpressed in leukemia tissues and specifically T cell and B cell non-Hodgkin's lymphoma and M. Hodgkin's lymphoma samples.

[0515] Following PCR amplification, the cDNAs were cloned into the pCR2.1-TOPO plasmid vector (Invitrogen).

[0516] Sequences obtained from these analyses were searched against known sequences in the publicly available databases using the BLAST 2.0 release. The default BLAST parameters used were as follows: GAP PARAMETERS: Open Gap=0, Extended Gap=0; OUTPUT PARAMETERS: Expect=10.0, Threshold=0, Number of Alignments=250; For BLASTN, the search parameters were as follows: Mismatch=−3, Reward=1, Word size=0. The alignments were presented pair-wise, with a window percent identity=22. All available protein and nucleotide databases were searched, including, PIR, SwissPROT, GenBank, Mouse EST, Human EST, Other EST, Human repeat and high throughput sequences, and published patents and patent application database.

[0517] From these, a number of unique sequences were identified that represented novel polynucleotide sequences that had not previously been described in the GenBank and other sequence databases. A number of other sequences were identified that appeared to contain significant homology with one or more sequences previously identified in the databases, although they were described only as genomic or cDNA clones, and had no known function. The remaining sequences corresponded to known genes. The clones obtained from this analysis are summarized in Tables 2-6 in co-pending application U.S. Ser. No. 09/796,692.

### 5.2 Example 2

### Analysis of Subtracted cDNA Sequences by Microarray Analysis

[0518] Subtracted cDNA sequences were analyzed by microarray analysis to evaluate their expression in hematological malignancies and normal tissues. Using this approach, cDNA sequences were PCR amplified and their mRNA expression profiles in hematological malignancies and normal tissues are examined using cDNA microarray technology essentially as described (Shena et al., 1995).

[0519] In brief, the clones identified from the subtracted cDNA libraries analyses were immobilized and arrayed onto glass slides as multiple replicas on microarray slides and the slides were hybridized with two different sets of probes, with each location on the microarray slide corresponding to a unique cDNA clone (as many as 5500 clones can be arrayed on a single slide, or chip). Each chip is hybridized with a pair of cDNA probes that are fluorescence-labeled with Cy3 and Cy5, respectively. The set of probes derived from the hematological malignancies was labeled with cy3 while the other set of probes derived from a pool of normal tissues was labeled with cy5. Typically, 1 μg of polyA⁺ RNA was used to generate each cDNA probe. After hybridization, the chips were scanned and the fluorescence intensity recorded for both Cy3 and Cy5 channels. The difference in intensities (i.e., cy3/cy5 ratios) following hybridization with both probe sets provided the information on the relative expression level of each cDNA sequences immobilized on the slide in tumor versus normal tissues. There are multiple built-in quality control steps. First, the probe quality is monitored using a panel of ubiquitously expressed genes. Secondly, the control plate also can include yeast DNA fragments of which complementary RNA may be spiked into the probe synthesis for measuring the quality of the probe and the sensitivity of the analysis. This methodology provides a sensitivity of 1 in 100,000 copies of mRNA, and the reproducibility of the technology may be ensured by including duplicated control cDNA elements at different locations.

[0520] Analysis of hematological malignancy subtracted clones by microarray analyses on a variety of microarray chips identified the sequences set forth in SEQ ID NO:1 through SEQ ID NO:668 of co-pending application U.S. Ser. No. 09/796,692 as being at least two-fold overexpressed in hematological malignancies versus normal tissues.

### 5.3 Example 3

### Polynucleotide and Polypeptide Compositions: Brief Description of the cDNA Clones and Open Reading Frames Identified by Subtractive Hybridization and Microarray Analysis

[0521] Table 7 in co-pending application U.S. Ser. No. 09/796,692 lists the sequences of the polynucleotides obtained during the analyses of the present invention. Shown are the 668 polynucleotide sequences, along with their clone name identifiers, as well as the serial number and filing date of the priority provisional patent application in which the clone was first identified.

[0522] Table 8 in co-pending application U.S. Ser. No. 09/796,692 identifies the putative open reading frames obtained from analyses of the cDNA sequences obtained in SEQ ID NO:1-SEQ ID NO:668 in the co-pending application. Shown are the sequence identifiers, the clone name and translation frame, and the start and stop nucleotides in the corresponding DNA sequence used to generate the polypeptide sequence of the open reading frame.

[0523] Table 9 in co-pending application U.S. Ser. No. 09/796,692 identifies an additional set of particular hematological malignancy-related cDNA sequences that were obtained using the subtractive library and microarray methods as described above. These sequences, designated SEQ ID NO:2533-SEQ ID NO:9597 in the co-pending application, are shown in the Table along with the original clone name, and the serial number and filing date of the priority provisional application in which the clone was first described.

### 5.4 Example 4

### Identification of a Specific Gene, Ly1448P, Associated with B Cell Leukemias, Lymphomas and Multiple Myelomas

[0524] SEQ ID NO:9599 in co-pending application U.S. Ser. No. 10/040,862, also termed “Ly1448P,” a portion of which was disclosed earlier in co-pending application U.S. Ser. No. 09/96,692 as SEQ ID NO:636 was identified in a series of MicroArray analyses as described in Examples 1-3 in sections 5.1-5.3 of co-pending application U.S. Ser. No. 09/796,692. Oligonucleotides directed against a portion of SEQ ID NO:9599 were used in a series of RealTime PCR experiments using RNAs isolated from normal cells and hematologically malignant cells. SEQ ID NO:9599 appeared to be expressed in normal B cell lines, CD 19⁺ cell lines, and highly expressed in a subset of Non-Hodgkin's B-cell lymphoma cell lines, Hodgkin's lymphoma cell lines, follicular lymphoma cell lines, and Chronic Lymphocytic Leukemia cell lines.

[0525] SEQ ID NO:9599, which is a 523 base pair cDNA fragment, was used to screen the LIFESEQ® Gold database and two additional clones were identified, SEQ ID NO:9598, also termed “LS 1384258.1”, which is a 622 base pair cDNA fragment, and SEQ ID NO:9600, also termed “LS 368109.1”, which is a 1,908 base pair cDNA.

[0526] The BLAST analysis determined that the open reading frame (ORF) of SEQ ID NO: 9600 begins at nucleotide 777, ends at nucleotide 1562 and encodes a 261 amino acid protein as identified in SEQ ID NO:9611, termed Ly1448P protein. Further analysis of SEQ ID NO:9600 using both TMpred and PSORTII indicated that SEQ ID NO:9611 is a type-1b membrane protein, containing a predicted transmembrane domain beginning at amino acid 156 and ending at amino acid 177. The extracellular portion of SEQ ID NO:9611 has homology with immunoglobulins and contains a predicted Ig-like domain. The intracellular portion of SEQ ID NO:9611 contains Src Homology-2 (SH2) binding domains an Immune Receptor Tyrosine-Based Inhibition Motif (ITIM) and an Immune Receptor Tyrosine-based Activation Motif (ITAM). As such, Ly1448P protein may play a specific role in hematopoetic cell signaling. Further structural and homology analysis of these cDNA fragments is described in the co-pending application U.S. Ser. No. 10/040,862 and are discussed below.

[0527] The Blast analysis also showed that Ly1448P shares homology with two other protein families, the SPAP1 family and the IRTA family. Ly1448P shares homology with the SPAP1 family of proteins which consists of 3 members, SPAP1a, SPAP1b, and SPAP1c. As discussed in more detail below, the SPAP1 proteins identified all have a unique 42 amino acid terminus. SPAP1b has a unique 18 amino acid carboxy terminus and SPAP1c has a unique 9 amino acid carboxy terminus. Ly1448P also shares homology with the IRTA family of proteins and specifically IRTA 4. As discussed in more detail below, Ly1448P and IRTA4 share multiple exons and the proteins identified appear to arise from alternative splicing events.

### 5.5 Example 5

### Identification of Ly1448 Immungenic Peptides

[0528] This example illustrates the identification of peptides useful for generating cytotoxic T cell or helper T cell responses.

[0529] Ly1448P protein peptides useful for generating a cellular immune response were identified. Preferred epitope binding motifs for many of the HLA class I and class II molecules are known. The Ly1448P amino acid sequence was searched for peptides that would bind to the specific HLA molecules identified in Table 2. 9mer peptides predicted to bind to each of the specific HLA molecules were identified and SEQ ID NOs corresponding to the peptides which bind to each HLA molecule are indicated.

TABLE 2
Ly1448P CTL Peptides Identified

| HLA molecule selected | Ly1448P peptides identified |
|---|---|
| HLA_0201 | SEQ ID NOs: 9618-9637 |
| HLA A_0205 | SEQ ID NOs: 9638-9657 |
| HLA A24 | SEQ ID NOs: 9658-9697 |
| HLA A3 | SEQ ID NOs: 9698-9717 |
| HLA A68.1 | SEQ ID NOs: 9718-9737 |
| HLA A_1101 | SEQ ID NOs: 9738-9757 |
| HLA A_3101 | SEQ ID NOs: 9758-9777 |
| HLA A_3302 | SEQ ID NOs: 9778-9797 |
| HLA B14 | SEQ ID NOs: 9798-9817 |
| HLA B40 | SEQ ID NOs: 9818-9837 |
| HLA B60 | SEQ ID NOs: 9838-9857 |
| HLA B61 | SEQ ID NOs: 9858-9877 |
| HLA B62 | SEQ ID NOs: 9878-9897 |
| HLA B7 | SEQ ID NOs: 9898-9917 |
| HLA B8 | SEQ ID NOs: 9918-9937 |
| HLA B_2702 | SEQ ID NOs: 9938-9957 |
| HLA B_2705 | SEQ ID NOs: 9958-9977 |
| HLA B_3501 | SEQ ID NOs: 9978-9997 |
| HLA B_3701 | SEQ ID NOs: 9998-10017 |
| HLA B_3801 | SEQ ID NOs: 10018-10037 |
| HLA B_3901 | SEQ ID NOs: 10038-10057 |
| HLA B_3902 | SEQ ID NOs: 10038-10057 |
| HLA B_4403 | SEQ ID NOs: 10058-10077 |
| HLA B_5101 | SEQ ID NOs: 10078-10097 |
| HLA B_5102 | SEQ ID NOs: 10098-10117 |
| HLA B_5103 | SEQ ID NOs: 10118-10137 |
| HLA B_5201 | SEQ ID NOs: 10138-10157 |
| HLA B_5801 | SEQ ID NOs: 10158-10177 |
| HLA Cw_0301 | SEQ ID NOs: 10178-10197 |
| HLA Cw_0401 | SEQ ID NOs: 10198-10217 |
| HLA Cw_0602 | SEQ ID NOs: 10218-10237 |
| HLA Cw_0702 | SEQ ID NOs: 10238-10257 |
| HLA Db | SEQ ID NOs: 10258-10277 |
| HLA Db_revised | SEQ ID NOs: 10278-10297 |
| HLA Dd | SEQ ID NOs: 10298-10317 |
| HLA Kb | SEQ ID NOs: 10318-10337 |
| HLA Kd | SEQ ID NOs: 10338-10357 |
| HLA Kk | SEQ ID NOs: 10358-10377 |
| HLA Kk | SEQ ID NOs: 10378-10397 |
| HLA Ld | SEQ ID NOs: 10398-10417 |
| HLA Cattle_A20 | SEQ ID NOs: 10418-10437 |

[0530] The location of additional immunogenic peptides was determined by analyzing the complete Ly1448P protein amino acid sequence of SEQ ID NO:9611 using the program TSITES. The results are shown in FIG. 5. TSITES identified the location of predicted amphipathic helices (A), the location of amino acid residues matching the Rothbard/Taylor motif (R), the location of residues matching the IAd motif (D) and the location of residues matching the IEd motif (d). Based on this analysis, four additional peptides were identified that are predicted to contain epitopes that will bind to CD4⁺ T cells. Peptide 1 spans amino acids 40-78 of the Ly1448P protein and is represented by SEQ ID NO:10455. Peptide 2 spans amino acids 127-150 of the Ly1448P protein and is represented by SEQ ID NO:10456. Peptide 3 spans amino acids 210-233 of the Ly1448P protein and is represented by SEQ ID NO:10457. Peptide 4 spans amino acids 141-178 of the Ly1448P protein and is represented by SEQ ID NO:10458.

[0531] Ly1448P protein immunogenic peptides comprising 5 non-overlapping 31mer or 32mer amino acid fragments (SEQ ID NOs:9613-9617) of the extracellular domain Ly1448P protein (amino acids 1-156 of SEQ ID NO:9611) were generated and are being used to generate antibodies specific for the Ly1448P protein. These antibodies will be useful in recognizing Ly1448P protein for diagnostic and therapeutic use in both normal and diseased cells. Each peptide fragment used to generate antibodies also contains a GCG peptide linker sequence at the carboxy-terminus of the fragment. These antibodies may also recognize the IRTA4 protein. Antibodies immunoreactive to epitopes present on peptides defined by SEQ ID NOs:9614-9617 may also recognize epitopes present in SPAP1a.

[0532] Seventeen overlapping immunogenic peptides derived from Ly1448P protein sequence were also generated. 16-30mer amino acid peptides were generated, each peptide contains sequential amino acid sequences and overlaps peptides containing adjacent sequences by 15 amino acids (SEQ ID NOs:10438-10453). One peptide encoding the carboxy-terminus of Ly1448P protein is 21 amino acids long and also overlaps the adjacent peptide by 15 amino acids (SEQ ID NO:10454). These seventeen peptides will also be used to generate antibodies immunoreactive to epitopes present on the peptides. Antibodies which recognize epitopes present on peptides identified by SEQ ID NOs:10438 and 10439 will recognize Ly1448P protein whereas antibodies which recognize epitopes present on peptides identified by SEQ ID NOs:10440-10454 may recognize both Ly1448P and SPAP1a proteins. Antibodies generated against all of these peptides may also recognize IRTA4. Antibodies generated against these 17 overlapping peptides will be useful for both diagnostic and therapeutic purposes.

### 5.6 Example 6

### Immunogenic Peptides Derived from the IRTA Proteins

[0533] This example illustrates the identification of peptides useful for generating cytotoxic T cell or helper T cell responses.

[0534] The amino acid sequences of each of the IRTA proteins, IRTA 1, 2a, 2b, 2c, 3, 4, and 5, were analysed using the program TSITES. This program identifies epitopes suitable for binding to T Helper cells. Peptides corresponding to each of the T Helper epitopes for each protein were identified. SEQ ID NOs corresponding to each of the peptides are presented in Table 3.

TABLE 3
IRTA T Helper Epitopes

| IRTA Protein | Peptides Identified |
|---|---|
| IRTA 1 | SEQ ID NOs: 11,061-11,080 |
| IRTA 2a | SEQ ID NOs: 11,081-11,098 |
| IRTA 2b | SEQ ID NOs: 11,099-11,115 |
| IRTA 2c | SEQ ID NOs: 11,116-11,130 |
| IRTA 3 | SEQ ID NOs: 11,131-11,147 |
| IRTA 4 | SEQ ID NOs: 11,148-11,165 |
| IRTA 5 | SEQ ID NOs: 11,166-11,177 |

### 5.7 Example 7

### Identification of Two Specific Genes, Ly1447 and Ly1481 are Associated with B Cell Leukemias, Lymphomas and Multiple Myelomas

[0535] This example illustrates the identification of two specific genes that are associated with B cell leukemias, lymphomas and multiple myelomas.

[0536] Ly1447 and Ly1481, portions of which were disclosed earlier in co-pending application U.S. Ser. No. 09/796,692, are cDNAs also associated with B cell leukemias, lymphomas and multiple myelomas. The nucleotide sequence of Ly1447 is disclosed herein as SEQ ID NO:9602. The nucleotide sequence of Ly1481 is disclosed herein as SEQ ID NO:9603. The amino acid sequence encoded by SEQ ID NO:6 is disclosed herein as SEQ ID NO:10466.

[0537] SEQ ID NOs:9602 and 9603 were used in BLASTX searches of both GenBank and GenSeq databases. Homologous sequences were only found in the GenSeq database. This analysis showed that SEQ ID NO:9602 was homologous to the 3′ untranslated region of the IRTA2c gene on chromosome 1. SEQ ID NO:9603 was homologous to a portion of the coding region of IRTA3 also on chromosome 1.

[0538] The IRTA superfamily of genes comprises IRTA 1, 2a, 2b, 2c, 3, 4, and 5, whose nucleic acid sequences are disclosed herein as SEQ ID NOs:9604-9610 respectively and whose corresponding amino acid sequences are disclosed herein as SEQ ID NOs:10459-10465 respectively. These IRTA genes are located on chromosome 1 (q21) and are associated with chromosomal translocations. These translocations combine a portion of chromosome 1 with a portion of chromosome 14 (q32). This portion of chromosome 14 is the location of the genes encoding the immunoglobulin proteins. These chromosomal translocations are associated with various B cell leukemias, lymphomas and multiple myelomas.

### 5.8 Example 8

### Detection of Ly1448P-Specific and TCL-1-Specific Antibodies in Patients with Hematological Malignancies

[0539] This example illustrates that Ly1448P-specific and TCL-1-specific antibodies are present in the sera of patients with hematological malignancies, such as, but not restricted to, lymphoma. Detection of these specific antibodies provides a tool for early diagnosis of hematological malignancies; specifically for the screening of healthy individuals or individuals at risk for developing lymphomas, such as transplant recipients and immunocompromised patients (i.e., AIDS patients) for the presence of hematological malignancies or a marker for monitoring minimal residual disease. Furthermore, these data demonstrate that Ly1448P and TCL-1 are immunogenic in patients.

[0540] The specific antibodies derived from these patients can be used to identify epitopes which can be used for the therapy of hematological malignancies. FIG. 5 shows the Ly1448P specific Ab data (black and white).

[0541] 48 control sera were screened by ELISA assay using recombinant Ly1448P protein or TCL-1 protein. The mean OD reading of all 48 normal sera+2.5× standard deviations was determined as a cut off level and shown in the figures as a black line. All sera demonstrating higher values were defined as positive.

### 5.9 Example 9

### Ly1448P Splice Variants Associated with B Cell Leukemias, Lymphomas and Multiple Myelomas

[0542] This example illustrates the identification of all of the exons and the various spliced forms of the Ly1448P gene and its encoded protein that are associated with B cell leukemias, lymphomas and multiple myelomas.

[0543] Co-pending application U.S. Ser. No. 10/040,862 describes that the nucleic acid sequence encoding Ly1448P (SEQ ID NO:9600) was used to screen the publicly available human genome database, Genbank and private databases. Additional Ly1448P sequences are presented here in SEQ ID NO:11,016. Homologous sequences were identified in the databases and on human chromosome 1. A BLAST search of GenBank determined that Ly1448P protein shared homology with three recently identified proteins, SH2 domain-containing phosphatase anchor proteins 1a (SPAP1a) 1b (SPAP1b) and 1c (SPAP1c), Xu et al., Biochem. Biophys. Res. Commun. 280: 768-775 (2001). These three proteins appear to be alternatively spliced forms of Ly1448P. The nucleic acid sequence encoding SPAP1a, an alternatively spliced variant of Ly1448P, is 765 nucleotides long (SEQ ID. NO:11,036) and encodes a protein 255 amino acids long (SEQ ID NOs:9612 and 11,057). Additional SPAP1a nucleotide sequences may be found in SEQ ID NOs:9601, 11,035 and Genbank Accession No. AF319438. SPAP1b is an alternatively spliced variant of both Ly1448P and SPAP1a. The nucleic acid sequence encoding SPAP1b is 576 bp (SEQ ID NO:11,038) and encodes a protein 192 amino acids long (SEQ ID NO:11,058). Additional SPAP1b nucleotide sequences may be found in SEQ ID NO:11,037 and Genbank Accession No. AF319439. SPAP1c is an alternatively spliced variant of Ly1448P and SPAPs1a and 1b. The nucleotide sequence encoding SPAP1c is 432 nucleotides long (SEQ ID NO:11292 and GenBank Acession No: AF319440) and encodes a protein 144 amino acids long (SEQ ID NO:11293).

[0544] A BLASTX search of both the GenBank and GenSeq databases indicated that Ly1448P and SPAP1a, 1b, and 1c also share homology with the Immunoglobulin Receptor Translocation Associated Protein 4 (“IRTA4”). IRTA4 also appears to be an alternatively spliced variant of Ly1448P and SPAP1a, 1b, and 1c. The nucleotide sequence encoding IRTA4 is 1524 nucleotides long (SEQ ID NO:11,001), and encodes a protein 508 amino acids long (SEQ ID NOs:10,464 and 11,039). Additional IRTA4 nucleotide sequences may be found in SEQ ID NOs:9609, 11,000 and Genbank Accession No. AF459633. Recently IRTA4 was also identified as a member of a family of Fc receptor homologs, specifically FcRH2 (Davis et al., Proc. Nat. Acad. Sci. USA 98:9772-9777 (2001) and Genbank Accession No. AY043465). Family members exhibit preferential B cell expression.

[0545] PCR primers comprising nucleotide sequences 5′CTGCTGTGGTCATTGCTGGTC3′ (sense) (SEQ ID NO:11,059) and 5′GACACTGGAATTCTCACAGGGATATTC3′ (antisense) (SEQ ID NO:11,060) were used to amplify IRTA4 and IRTA4 like sequences from a B cell cDNA library comprising cDNAs prepared from three B cell non-Hodgkin's lymphoma samples. One clone, isolated and characterized, appeared to be another alternatively spliced version of Ly1448P and IRTA4 and is termed Patti PCR clone or FL PCR ORF Clone (SEQ ID NO:11,032). SEQ ID NO:11,032 is 2392 nucleotides in length and contains two open reading frames. Open reading frame 1 (“ORF1”) (SEQ ID NO:11,033) is 420 nucleotides long and encodes a 140 amino acid protein (SEQ ID NO:11,055). Open reading frame 2 (“ORF2”) (SEQ ID NO:11,034) is 783 nucleotides long and encodes a 261 amino acid protein (SEQ ID NO:11,056).

[0546] Exons and introns were identified by comparing the publicly available chromosome 1 genomic sequence data to nucleotides encoding a Ly1448P fragment, IRTA4, LY1448P, Patti PCR Clone, SPAP1a, 1b, and 1c, (SEQ ID NOs:9598, 11,000, 11,016, 11,032, 11,035, 11,037 and 11,292 respectively) and are shown diagrammatically in FIG. 7. Open reading frames were identified using the DNASTAR™ MapDraw program (DNASTAR Inc.). This comparison identified 18 exons in this region of chromosome 1. This comparison further identified alternatively used exons and exons containing alternatively used splice donors or splice acceptors. Sequences for each of these exons and exons containing alternatively used splice donors or acceptors are found in SEQ ID NOs:10,979-10,999 as shown in Table 4.

TABLE 4

| EXON NUMBER | SEQ ID NO: |
|---|---|
| Exon 1 | SEQ ID NO: 10,979 |
| Exon 2 | SEQ ID NO: 10,980 |
| Exon 3 | SEQ ID NO: 10,981 |
| Exon 4 | SEQ ID NO: 10,982 |
| Exon 5 | SEQ ID NO: 10,983 |
| Exon 6 | SEQ ID NO: 10,984 |
| Exon 7 | SEQ ID NO: 10,985 |
| Exon 8 | SEQ ID NO: 10,986 |
| Exon 9 | SEQ ID NO: 10,987 |
| Exon 10 | SEQ ID NO: 10,988 |
| Exon 10GT | SEQ ID NO: 10,989 |
| Exon AG11 | SEQ ID NO: 10,990 |
| Exon 12 | SEQ ID NO: 10,991 |
| Exon AG12 | SEQ ID NO: 10,992 |
| Exon 13 | SEQ ID NO: 10,993 |
| Exon 13GT | SEQ ID NO: 10,994 |
| Exon 14 | SEQ ID NO: 10,995 |
| Exon 15 | SEQ ID NO: 10,996 |
| Exon 16 | SEQ ID NO: 10,997 |
| Exon 17 | SEQ ID NO: 10,998 |
| Exon 18 | SEQ ID NO: 10,999 |

[0547] Exons 10 and 13 contain alternatively used splice donors and exons 11 and 12 contain alternatively used splice acceptors. Full length exon 11 is used in the Ly1448P fragment (SEQ ID NO:9598). All other transcripts use the alternative splice acceptor form of exon 11. Full length exon 12 contains a translation start site and is used in all SPAP1 transcripts (splice forms r and s and SPAP1c) (SEQ ID NOs:11,035-11,038 and 11,291-11,292). Splice form SPAP1c does not contain any exon 13 sequences and contains 27 additional nucleotides at the 3′ end of exon 12 encoding 9 additional amino acids that are found at the carboxy terminus of SPAP1c protein (SEQ ID NOs:11,293). Full length exon 13 is used in SPAP1b transcripts (splice form s) (SEQ ID NO:11,037-11,038) and contains a transcription stop codon and polyadenylation signals. Exon 7 contains a translational start site and is used in IRTA4 transcripts (splice forms a-h and q) (SEQ ID NOs:11,000-11,015 and 11,032-11,033). Exons 1-6 are used in Ly1448P transcripts (splice forms i-p) (SEQ D NOs:11,016-11,31). Exon 9 contains a translation start site for splice forms i-p. Exon 10 using the alternative splice donor is found in the Patti PCR Clone (splice form q1) (SEQ ID NOs:11,032-11,034. Exons 13 and 13GT contain the transmembrane domain. Exon 12 contains the translation start sight for splice forms r and s. These results are also shown diagrammatically in FIGS. 8 and 9. Sequences encoding each of the potential combinations may be found in Table 5.

[0548] The multiple alternate splice forms for genes and their encoded proteins include both predicted membrane (receptor) and non-membrane molecules. For example, Patti PCR Clone ORF1 encodes a secreted non-membrane bound molecule (SEQ ID NOs:11,032-11,033 and 11,055). Patti PCR Clone ORF1 contains the extracellular domains found in exons 7-9 and 10GT and novel amino acids encoded by exon AG11 (see FIG. 9, splice form q1). SPAP1c also encodes a secreted protein (SEQ ID NOs:11,291-11,293). SPAP1c contains the same amino terminal 135 amino acids found in SPAP1a and 1b and contains a unique 9 amino acid carboxy terminus. All of the alternatively spliced molecules identified in FIG. 8 and Table 5 and shown diagrammatically in FIG. 9 have different biological activity. By way of example, different membrane (receptor) Ly1448P molecules can have different signal transduction properties dependent on the composition of their intracellular polypeptide sequence (the “signaling” portion of the molecule) and their extracellular polypeptide sequence (the “ligand-binding” portion of the molecule). The linking of different extracellular domains to different intracellular sequences provides for receptors that yield different functional signals (e.g. proliferation, differentiation, apoptosis) in response to the same or a different ligand. Non-membrane Ly1448P molecules act to modulate signal from the membrane receptor Ly1448P molecules by acting as competitors by binding to ligand, or by binding to intracellular proteins responsible for transducing the signal from the receptor. Such examples result in both positive (e.g. proliferation/differentiation) and negative (e.g. apoptosis) affects on cells expressing these proteins. Antibodies directed to the various forms of Ly1448P, which in turn contain different epitopes, modulate the biological effect of Ly1448P in a similar manner. Probes (e.g. antibodies or oligonucleotides) directed to alternatively spliced forms of the proteins or nucleic acids are useful as diagnostics to determine which Ly1448P variant is being expressed. These probes are useful as therapeutics to antagonize the specific forms of the Ly1448P gene or protein.

TABLE 5

| | Nucleotide | Polypeptide |
|---|---|---|
| Splice Form | SEQ ID NO: | SEQ ID NO: |
| Ly1448P_a | SEQ ID NO:11,000-11,001 | SEQ ID NO:11,039 |
| Ly1448P_b | SEQ ID NO:11,002-11,003 | SEQ ID NO:11,040 |
| Ly1448P_c | SEQ ID NO:11,004-11,005 | SEQ ID NO:11,041 |
| Ly1448P_d | SEQ ID NO:11,006-11,007 | SEQ ID NO:11,042 |
| Ly1448P_e | SEQ ID NO:11,008-11,009 | SEQ ID NO:11,043 |
| Ly1448P_f | SEQ ID NO:11,010-11,011 | SEQ ID NO:11,044 |
| Ly1448P_g | SEQ ID NO:11,012-11,013 | SEQ ID NO:11,045 |
| Ly1448P_h | SEQ ID NO:11,014-11,015 | SEQ ID NO:11,046 |
| Ly1448P_i | SEQ ID NO:11,016-11,017 | SEQ ID NO:11,047 |
| Ly1448P_j | SEQ ID NO:11,018-11,019 | SEQ ID NO:11,048 |
| Ly1448P_k | SEQ ID NO:11,020-11,021 | SEQ ID NO:11,049 |
| Ly1448P_l | SEQ ID NO:11,022-11,023 | SEQ ID NO:11,050 |
| Ly1448P_m | SEQ ID NO:11,024-11,025 | SEQ ID NO:11,051 |
| Ly1448P_n | SEQ ID NO:11,026-11,027 | SEQ ID NO:11,052 |
| Ly1448P_o | SEQ ID NO:11,028-11,029 | SEQ ID NO:11,053 |
| Ly1448P_p | SEQ ID NO:11,030-11,031 | SEQ ID NO:11,054 |
| Ly1448P_qORF1 | SEQ ID NO:11,032-11,033 | SEQ ID NO:11,055 |
| Ly1448P_qORF2 | SEQ ID NO:11,032&11,034 | SEQ ID NO:11,056 |
| Ly1448P_r | SEQ ID NO:11,035-11,036 | SEQ ID NO:11,057 |
| Ly1448P_s | SEQ ID NO:11,037-11,038 | SEQ ID NO:11,058 |
| SPAP1c | SEQ ID NO:11,291-11,292 | SEQ ID NO:11,293 |

### 5.10 Example 10

### Ly1448P Specific Antibodies

[0549] This example illustrates the production of recombinant Ly1448P protein in E. coli. This example further illustrates the production of polyclonal and mono-clonal anti-sera against that recombinant protein. These anti-sera are useful as diagnostics to identify tumors expressing the Ly1448P antigen. These anti-sera are useful as therapeutics for treating tumors expressing the Ly1448P antigen.

[0550] The nucleotide sequence encoding Ly1448P (nucleotides 780-1573 of SEQ ID NO:9600) were cloned into the E. coli expression vector pET 28 which had been modified to include nucleotides encoding an initiation methionine residue, a glutamine residue and a six amino acid histidine tag adjacent to transcription initiation sequences of the vector. PCR primers comprising nucleotide sequences 780-801 (sense) and 1559-1573 (antisense) of SEQ ID NO:9600 were used to amplify a nucleotide sequence encoding amino acids 2-261 of SEQ ID NO:9611 using standard techniques (Sambrook et al., supra and Ausubel et al., supra). The antisense primer also contained a XhoI restriction enzyme site to facilitate cloning. The resulting PCR product was digested with XhoI and ligated into the modified pET 28 which had been digested with Eco 721 and XhoI. The recombinant clone was used to transform BLR (DE3) pLys S and HMS 174 pLys S bacteria. Ly1448P protein was purified from recombinant bacterial cultures. Ly1448P protein was purified from cell lysates by Ni column chromatography (Qiagen), followed by anion exchange chromatography and anti-his affinity chromatography steps.

[0551] The resulting purified recombinant Ly1448P protein and KLH (keyhole limpet hemocyanin) conjugated, 31-mer peptides corresponding to the LY1448 amino acids 1 to 31 (SEQ ID NO:9613) (MGKKTQRSLSAELEIPAVKESDAGKYYCRAD-GCG-KLH) (peptide 1) and 63 to 93 (SEQ ID NO:9615) (QAAVGDLLELHCEALRGSPPILYQFYHEDVT-GCG-KLH) (peptide 3) was injected into rabbits using the following scheme: day 0: 0.15 mg/rabbit, in CFA, (complete Freund's adjuvant) s.c., day 21:0.15 mg/rabbit, in IFA, (incomplete Freund's adjuvant) s.c., day 35:0.15 mg/rabbit, in IFA, s.c., day 42:production bleed (˜20 mL).

[0552] For ELISA analysis of antigen specificity, rabbit sera were titered against Ly1448P-coated (0.1 mg/well) 96-well microtiter plates. Samples were diluted initially at 1:100, and then serially diluted 3 fold and added to the plates in duplicate. Antigen specific binding of rabbit IgG to the plate was revealed by goat anti-rabbit IgG (H+ L)-HRP conjugate, and the plates were developed with TMB substrate and read at OD450 nm on a microplate reader.

[0553] For FACS analysis, HEK293 and Ly1448P/HEK293 cells (infra) were collected and washed with ice cold staining buffer (PBS+1% BSA+Sodium Azide). Next, the cells were resuspended in 50 ul staining buffer and incubated for 30 minutes on ice with 75 ul of rabbit anti-Ly1448P recombinant or peptide sera diluted 1:500. Pre-bleed sera was used at the same concentration as a negative control. The cells were washed 3 times with staining buffer and then incubated with a 1:100 dilution of a goat anti-rabbit Ig(H+ L)-FITC reagent (Southern Biotechnology) for 30 minutes on ice. Following 3 washes, the cells were resuspended in staining buffer containing Propidium Iodide (PI), a vital stain that allows for identification of permeable cells, and analyzed by FACS.

[0554] The results of the FACS analysis show that the polyclonal antisera raised against the full length recombinant protein (anti-Ly1448P antisera) and both synthetic peptides (anti-peptide anti-sera) were able to recognize and bind to full length, native Ly1448P expressed in HEK293 transfectants. Pre-immunization (pre-bleed) antisera obtained from the each rabbit did not bind to the Ly1448P/HEK293 expressing cells. Similarly, anti-Ly1448P and anti-peptide antisera did not bind to control HEK293 cells.

[0555] The results of the ELISA assys show that anti-Ly1448P antisera raised were able to bind strongly to immobilized recombinant Ly1448P and peptide 1 (SEQ ID NO:9613) and bind weakly to the peptide 3 (SEQ ID NO:9615). Polyclonal antisera (anti-peptide 1) raised against the synthetic peptide 1 (SEQ ID NO:9613) bound strongly to peptide 1 (SEQ ID NO:9613) and recombinant LY1448 protein, and did not bind at all to peptide 3 (SEQ ID NO:9615). Polyclonal antisera (anti-peptide 3) raised against the synthetic peptide 3 (SEQ ID NO:9615) bound strongly to peptide 3 (SEQ ID NO:9615) and the recombinant Ly1448P protein. Anti-peptide 3 bound weakly to peptide 1. These results indicate that the anti-Ly1448P antisera and the anti-peptide antisera recognize epitopes present on LY1448 and would be useful for both therapeutic and diagnostic purposes.

[0556] Murine monoclonal antibodies specific for recombinant Ly1448P were also generated. The monoclonal antibodies were raised by immunization of mice with bacterially-expressed recombinant protein Ly1448P. Conventional antibody-secreting murine hybridomas were made by fusion of the immune spleen cells with murine myeloma cells. Ly1448P specific mAbs were identified in the supernatants of the hybridomas by ELISA using recombinant Ly1448P protein and Ly1448P-FLAG/pCEP4/HEK293 transfectants. The hybridomas were cloned and antibody secretion was stabilized. Specificity of the antibodies was confirmed by Western blot with recombinant protein and immunohistochemistry with Ly1448P/HEK transfectants. Epitope specificity was determined by ELISA with synthetic peptides deduced from the sequence of Ly1448P. These monoclonal antibodies are used therapeutically or as diagnostic reagents in hematologic malignancies.

[0557] Female Balb/c mice were immunized intraperitoneally with 10-25 micrograms of bacterially produced recombinant Ly1448P protein in adjuvant at intervals of 9 to 60 days. After five immunizations in adjuvant, 3 micrograms of recombinant protein were administered intravenously in the absence of adjuvant. Two days later immune spleen cells were harvested and hybridomas were made using conventional PEG-mediated fusion and cells were distributed among several hundred microtiter wells and cultured under HAT selection. In approximately 2 weeks a majority of wells showed growth and supernatants were harvested and assayed by ELISA for the presence of antibody reactive to recombinant Ly1448P protein. The ELISA method was performed as follows:

[0558] Nunc MaxiSorp 96-well plates (Sigma) were coated overnight at 4° C. with peptides at 10 μg/ml in sodium carbonate buffer (pH9.6), using 100 μl/well. Ly1448P recombinant protein and an irrelevant peptide were coated at 1 μg/ml as positive and negative controls, respectively. Plates were washed with phosphate buffered saline(PBS)/Tween (Sigma) and blocked with Super Block (250 μl/well) for 1 hour at room temperature. Plates were washed after blocking, mAbs and control muring IgG were diluted in Super Block to 1 μg/ml and added to each infividual peptide/protein-coated well, 100 μl/well. Incubation time is 1 hour at room temperature. Plates were washed at the end of the incubation period with PBS/Tween. Bound antibodies were detected by adding horse radish peroxidase (HRP) conjugated goat anti-mouse IgG Fcγ (Jackson Labs, 1:5000 dilution in PBS/Tween), 150 μl/well, and incubated for 1 hour at room temperature. o-phenylenediamine (OPD) peroxidase substrate (Sigma) was made and added to the washed plates, 150 μl/well and incubated for twenty minutes at room temperature. The reaction was stopped by adding 2N HCl, 50 μl/well. Absorbances at 490 nm were measured by a plate reader from Molecular Devices.

[0559] Cells from wells identified as positive by this method were subcloned by limiting dilution two times. For each subcloning, mAb-secreting clones were identified using the recombinant Ly1448P protein ELISA assay. 4 cloned mABs were isolated and isotyped: 7A9, IgG1; 11E1, IgG1; 18B9, IgG2a; 18H10, IgG1. The specific epitope recognized by these mAbs was determined using synthetic peptides encoding different segments of the Ly1448P protein. This ELISA was performed as described above except that the different peptides were used to coat the microtiter wells and each mAb was tested against each peptide separately in order to determine the location of the epitope. Three of the mAbs, 7A9, 11E1, and 18B9 bound to a peptide spaning the C-terminal 25 amino acid segment of Ly1448P as represented by amino acids 343-367 of SEQ ID NO:11,050. The 18H10 mAb bound to a 25 amino acid segment of Ly1448P which begins 31 amino acids N-terminal to the start of the C-terminal peptide and is represented by amino acids 313-336 of SEQ ID NO:11,050. Thus all mAbs were mapped to within the C-terminal 55 amino acid segment of Ly1448P.

### 5.11 Example 11

### Ly1448 Protein is a Cell Surface Protein

[0560] This example illustrates that the Ly1448P protein encoded by SEQ ID NO:9600 is a cell surface protein.

[0561] The nucleotide sequence encoding Ly1448P was sub-cloned in to the mammalian expression vector pCEP4 (Invitrogen) as follows. The portion of SEQ ID NO:9600 encoding a portion of the Ly1448P protein was PCR amplified using a sense amplimer comprising nucleotides 777-800 of SEQ ID NO:9600 and additional nucleotides on the 5′ end which contained a HindIII restriction enzyme site and an anti-sense primer comprising nucleotides 1544-1570 of SEQ ID NO:9600 and additional nucleotides on the 3′end which contained a NotI restriction enzyme site. The PCR product was cloned into the pCR-Blunt vector (Invitrogen), and sequenced. DNA from a pCR-Blunt clone with the correct sequence was digested with HindIII and NotI to release the Ly1448P cDNA insert and subcloned into the mammalian expression vector pCEP4 (Invitrogen) which had been previously modified to contain a c-terminal FLAG epitope tag (Sigma; amino acid sequence DYKDDDDK, SEQ ID NO:11,290). The resulting recombinant vector Ly1448P-FLAG/pCEP encoded a Ly1448P-FLAG fusion protein.

[0562] To determine if the recombinant expression vector Ly1448P-FLAG/pCEP would express protein, the recombinant vector was transiently transfected into HEK293 cells using Lipofectamine 2000 according to manufacturers instructions (GibcoBRL). Separately, HEK293 cells were also transfected with a control vector containing a recombinant FLAG construct and non-recombinant pCEP4 vector. Transfected cells were cultured for 48 hours and then whole cell lysates were prepared. Lysates were run on a polyacrylamide gel, and the gel was electroblotted onto nitrocellulose membrane using standard techniques (Ausubel et al.,). The electroblot was probed with a mouse anti-FLAG monoclonal antibody and binding of the mouse mAb was detected with a biotinylated rabbit anti-mouse IgG and developed with avidin-HRP and ECL reagent. Anti-FLAG antibodies recognized a Ly1448P-FLAG fusion protein of the expected molecular weight.

[0563] To determine if recombinant Ly1448P protein was present on the cell surface, HEK293 cells transiently transfected with Ly1448P-FLAG/pCEP4 were biotinylated with Biotin-7-NHS, cells were washed and whole cell lysates were generated in TRITON X-100 lysis buffer. Lysates were immunoprecipitated with anti-FLAG Sepharose and the resulting immunoprecipitated material was run on a polyacrylamide gel. The gel was electroblotted onto nitrocellulose membrane and the blot was developed with avidin-HRP and ECL reagent. The data show that a protein precipitable with anti-FLAG sepharose of the expected molecular weight for a Ly1448P-FLAG fusion protein was biotinylated in a whole cell assay indicating that Ly1448P is found on the cell surface.

### 5.12 Example 12

### Ly1448P is Expressed on the Cell Surface of B Cell Leukemias

[0564] This example illustrates that Ly1448P protein is detected on the surface of an acute lymphoblastic leukemia cell line SUP-B15 (ATCC Cat # CRL-1929) using polyclonal antibodies described in Example 10.

[0565] SUP-B15 cells were cultured according to the suppliers recommendation. For FACS analysis, SUP-B15 and human fibroblasts were collected and washed with ice cold staining buffer (PBS+1% BSA+Sodium Azide). Next, the cells were resuspended in 50 ul staining buffer and incubated for 30 minutes on ice with 75 ul of rabbit anti-Ly1448P recombinant sera diluted 1:500 (see Example 10). Pre-bleed sera was used at the same concentration as a negative control. The cells were washed 3 times with staining buffer and then incubated with a 1:100 dilution of a goat anti-rabbit Ig(H+ L)-FITC reagent (Southern Biotechnology) for 30 minutes on ice. Following 3 washes, the cells were resuspended in staining buffer containing Propidium Iodide (PI), a vital stain that allows for identification of permeable cells, and analyzed by FACS.

[0566] The results of the FACS analysis show that the anti-Ly1448P polyclonal antisera was able to recognize and bind to native Ly1448P normally expressed on the surface of SUP-B15 cells. Pre-immunization (pre-bleed) antisera obtained from each rabbit used to produce anti-Ly1448P antisera did not bind to the SUP-B15 cells. Similarly, anti-Ly1448P antisera did not bind to control human fibroblast cells. These results show that the polyclonal antisera generated against Ly1448P recombinant protein binds to Ly1448P naturally expressed on tumor cells such as SUP-B15 and these antibodies can be used for diagnosis and treatment of B-cell malignancies such as lymphomas, myelomas and B-cell leukemias such as CLL and ALL.

### 5.13 Example 13

### Novel Splice Junctions Associated with Ly1448P Splice Variants

[0567] This example illustrates the identification of 11 novel nucleotide sequences and 11 novel polypeptide sequences useful for differentiating among the multiple splice variants of Ly1448P identified in Example 9. The novel polypeptide junctions contain epitopes that are unique. Antibodies specific for each epitope are useful for determining which splice form is expressed in a tumor or tissue sample of interest. The nucleotide sequences disclosed are useful as probes for determining which splice variant is being expressed in a tumor or tissue sample of interest.

[0568] Novel junction #1 is identified in splice forms Ly1448P b, d, f, h, i, k, m, and o and shown diagramatically in FIG. 9. Novel junction #1 is generated from a splice donor in exon 9 and a splice acceptor in exon (ag)11. Exon 10 is eliminated in this splice variant of Ly1448P. Ly1448P novel junction#1 40mer is a polypeptide (SEQ ID NO:11,186) containing the 20 amino acids either side of the novel protein junction and contains a novel linear epitope that is recognized by an antibody that is specific to this polypeptide junction and splice forms that encode it. Ly1448P novel junction#1 30mer is a shorter polypeptide (SEQ ID NO:11,187) containing the 15 amino acids either side of the same novel protein junction and contains a more defined novel linear epitope that is recognized by an antibody that is specific to this junction and splice forms that encode it. The nucleotide sequence encoding these two polypeptides are identified in SEQ ID NOs: 11,178 and 11,179 respectively.

[0569] Novel junction #2 is identified in splice forms Ly1448P c, d, g, h, k, 1, o, and p shown diagramatically in FIG. 9. Novel junction #2 is generated from a splice donor at the end of exon 11 and a splice acceptor in exon 13. Exon 12 is eliminated in this splice variant of Ly1448P. Ly1448P novel junction#2 40mer is a polypeptide (SEQ ID NO:11,188) containing the 20 amino acids on either side of the novel protein junction and contains a novel linear epitope that is recognized by an antibody that is specific to this polypeptide junction and splice forms that encode it. Ly1448P novel junction#2 30mer is a shorter polypeptide (SEQ ID NO:11,189) containing the 15 amino acids either side of the same novel protein junction and contains a more defined novel linear epitope that is recognized by an antibody that is specific to this junction and splice forms that encode it. The nucleotide sequence encoding these two polypeptides are identified in SEQ ID NOs: 11,180 and 11,181 respectively.

[0570] Novel junction #3 is identified in splice forms Ly1448P e, f, g, h, m, n, o, p, and s, shown diagramatically in FIG. 9. Novel junction #3 is generated by a failure to utilize a splice doner present in exon 13 resulting in a read through of the splice donor adjacent to the transmembrane domain and the synthesis of novel peptides encoded by the remainder of exon 13. Ly1448P novel junction#3 38mer is a polypeptide (SEQ ID NO:11,190) containing the 20 amino acids to the amino side of the exon 13 splice donor and the 18 amino acids to the carboxy side of the exon 13 splice donor. This polypeptide contains a novel linear epitope that is recognized by an antibody that is specific to this polypeptide junction and splice forms that encode it. Ly1448P novel junction#3 30mer is a shorter polypeptide (SEQ ID NO:11,191) containing the 15 amino acids on either side of the same exon 13 splice donor and contains a more defined novel linear epitope that is recognized by an antibody that is specific to this junction and splice forms that encode it. The nucleotide sequence encoding these two polypeptides are identified as SEQ ID NOs: 11,182 and 11,183 respectively.

[0571] Novel junction #4 is identified in splice form Ly1448P q1 and shown diagramatically in FIG. 9. Novel junction #4 is generated from a novel splice doner in exon 10(gt) and a splice acceptor in exon (ag)11. A portion of exon 10 is eliminated and 4 novel amino acids encoded by exon (ag)11 are incorporated in this splice variant. The novel amino acids result from the use of a different reading frame for that portion exon (ag)11 contained in this splice variant. Ly1448P novel junction#4 24mer is a polypeptide (SEQ ID NO:11,192) containing the 20 amino acids to the amino side of the novel protein junction and the 4 amino acids to the carboxy side of the novel protein junction. This polypeptide contains a novel linear epitope that is recognized by an antibody that is specific to this polypeptide junction and splice forms that encode it. Ly1448P novel junction#4 19mer is a shorter polypeptide (SEQ ID NO: 11,193) containing the 15 amino acids to the amino side of of the novel protein junction and the 4 amino acids to the carboxy side of the novel protein junction. This polypeptide contains a novel linear epitope that is recognized by an antibody that is specific to this polypeptide junction and splice forms that encode it. The nucleotide sequence encoding these two polypeptides is disclosed in SEQ ID NOs: 11,184 and 11,185 respectively.

[0572] Novel junction #5 is identified in splice forms Ly1448P r and s shown diagramatically in FIG. 9. Novel junction #5 is generated by a transcript containing all of exon 12. Translation of the entire exon 12 generates a peptide containing 42 amino acids that are not contained in other Ly1448P variants. The nucleotide sequence encoding the polypeptide sequence unique to Ly1448P splice variants r and s and the encoded peptide are disclosed in SEQ ID NOs:11,206 and 11,209 respectively. Ly1448P #5 plus20mer is a polypeptide (SEQ ID NO:11,211) containing the unique Ly1448P variants r and s polypeptide and the 20 amino acids adjacent to the novel peptide encoded by exon 13. This polypeptide contains novel linear epitopes that are recognized by antibodies that are specific to this polypeptide and the unique junction encoded by Ly1448P splice forms r and s. Ly1448P #5 plus15mer is a shorter polypeptide (SEQ ID NO: 11,210) containing the unique Ly1448P variants r and s polypeptide and the 15 amino acids adjacent to the novel peptide encoded by exon 13. This polypeptide contains more defined novel linear epitopes that are recognized by antibodies that are specific to Ly1448P variants r and s and this junction encoded by exon 13. The nucleotide sequence encoding these two polypeptides is included as SEQ ID NOs:11,208 and 11,207 respectively. Antibodies raised against the unique Ly1448P variants r and s polypeptides described Ly1448P #5 plus15mer and Ly1448P #5 plus20mer are specific to Ly1448P variants r and s. SPAP1c is a variant of Ly1448P variants r and s. SPAP1c contains the same amino terminal 135 amino acids as Ly1448P variants r and s (also know as SPAP1a and 1b) but contains a unique 9 amino acid carboxy terminus (SEQ ID NO:11,293). Antibodies raised against this 9 amino acid region would be able to differentiate between SPAP1c and Ly1448P variants r and s. All of these antibodies are used in the diagnosis, monitoring and therapeutic treatment of hematologic malignancies in general and CLL specifically.

[0573] Antibodies that recognize these epitopes described above specifically recognize splice variants of Ly1448P that encode these epitopes and differentiate from splice variants that do not contain them. Moreover, inclusion of different and novel polypeptide junctions, as a result of differential splicing result in different secondary, tertiary structures of the molecules that contain them. Antibodies directed toward the Ly1448P molecules that occur as a result of differential splicing recognize these novel splice forms based on their unique and different secondary and tertiary structures. Antibodies that recognize the different Ly1448P molecules, based on differences in secondary and tertiary structure that result from the differential splicing, identify specific different splice variants of Ly1448P and differentiate between them. Antibodies (naked and conjugated) directed to the specific splice forms can be used to identify and target these splice forms that may be differentially expressed between different hematologic malignancies (including, but not necessarily limited to, different classes of B-cell non-Hodgkins lymphoma and CLL). Therefore, antibodies directed to one or more of the Ly1448P splice forms provide for a better diagnostic or therapeutic antibody in one clinical indication verses another.

[0574] The Ly1448P variants r and s polypeptides described contain T-cell epitopes that can be utilized as a T-cell therapeutic vaccine for the treatment of hematologic malignancies in general and CLL specifically. Polypeptide sequences (9mers) contained within polypeptide sequence Ly1448P #5 plus20mer that are predicted to be bound by different HLA class I subtypes by the EpiSeek HLA class I binding prediction program (Parker et al., J. Immunol. 152:163-175 (1994)) are disclosed in SEQ ID NOs:11,212-11,287.

### 5.14 Example 14

### Identification of IRTA 1, 2a, 2b, 5 and Ly1448P Splice Variants in B-Cell Neoplasias

[0575] This example illustrates that the cell surface proteins IRTA 1, 2a, 2b, 5 and Ly1448P splice variants are expressed in B-Cell neoplasias. Diagnostic and therapeutic antibodies and compounds directed at these molecules are useful for treating the neoplasias expressing these proteins.

[0576] Real Time PCR analysis was performed on a panel of cDNAs derived from CLL patient samples, lymphoma patient samples, normal hematologic cells and normal tissues. Primers were designed that were specific for each of the IRTA or Ly1448P family members. Forward and reverse IRTA1 primers are disclosed in SEQ ID NOs:11,194 and 11,195 respectively. Forward and reverse IRTA 2a primers are disclosed in SEQ ID NOs:11,196 and 11,197 respectively. Forward and reverse IRTA 2b primers are disclosed in SEQ ID NOs:11,198 and 11,199 respectively. Forward and reverse primers amplifying a portion of exon 11 contained in Ly1448P splice variants a-p and q2 are disclosed in SEQ ID NOs:11,200 and 11,201 respectively. Forward and reverse primers amplifying a portion of exon 12 contained in Ly1448P splice variants r and s are disclosed in SEQ ID NOs:11,202 and 11,203 respectively. Forward and reverse IRTA5 primers are disclosed in SEQ ID NOs:11,204 and 11,205 respectively. Forward and reverse CD20 primers are disclosed in SEQ ID NOs: 11,288 and 11,289 respectively.

[0577] Real Time PCR was performed as described by Gibson et al., Genome Research 6:995-1001 (1996) and Heid et al., Genome Research 6:986-994 (1996) using a Perkin Elmer/Applied Biosystems 7700 Prism instrument. Matching primers and fluorescent probes are designed for genes of interest, for example, by using the primer express program provided by Perkin Elmer/Applied Biosystems. Optimal concentrations of primers and probes are determined by routine experimentation, and control (e.g. β-actin) primers and probes are obtained commercially from, for example, Perkin Elmer/Applied Biosystems. Standard curves are generated using the Ct values determined in the Real Time PCR, which are related to the initial cDNA concentration used in the assay. Standard dilutions ranging from 10-10⁶ copies of the gene of interest are generally sufficient. In addition, a standard curve is generated for the control sequence. This permits the standardization of initial RNA content of a tissue sample to the amount of control for comparison purposes.

[0578] Real Time results were expressed as deltaCT (each sample normalized to actin but a gene of interest standard curve was not run to determine copy# of actin message/pg of RNA) and are therefore values are only relative to each other within a specific experiment/run. Absolute values were approximated between experiments by comparing the mean cycles taken for half maximal amplification. For all experiments/runs actin required 20-23 cycles to be amplified. By comparison the CD20 gene, a highly expressed B-cell marker, required 21 cycles to be amplified from CD19+ sorted cells (13 cells), exon 12 containing Ly1448P splice variants required 26 cycles to be amplified from the same population of cells and exon 11 containing Ly1448P splice variants required 33 cycles.

[0579] The results indicate that Ly1448P splice variants r/s containing full length exon 12 were overexpressed in 59% (10/17) of CLL samples and had no detectable expression (0/5) in B-cell Non-Hodgkinslymphoma/Hodgkins samples at a level comparable or greater than that seen in CD19+ cells. Ly1448P splice variants a-p and q2 containing a portion of exon 11 were only expressed in 6% (1/17) of CLL samples but was seen in 100% (5/5) of B-cell Non-Hodgkins lymphoma/Hodgkins samples at a level comparable or greater than that seen in CD19+ cells. Thus, over-expression of exon 11 containing Ly1448P splice variants is specific to CD19+ cells and B-cell non-Hodgkins lymphomas/Hodgkins lymphoma samples, whereas overexpression of full length exon 12 containing Ly1448P splice variants is specific to CD19+ cells and a majority of CLL samples. Both types of splice variants are expressed in the single follicular lymphoma sample analysed. However, expression of exon 12 containing Ly1448P splice variants is considerably higher than the expression of exon 11 containing Ly1448P splice variant, requiring only 23-25 cycles to be amplified as compared to 29-31 cycles.

[0580] Similarly, IRTA2a/b and IRTA5 also show overexpression in CLL samples at a level comparable to that seen with exon 12 containing Ly1448P splice variants. IRTA1, in contrast, is overexpressed in lymphoma at lower levels similar to those observed for exon 11 containing Ly1448P splice variants. These RNA expression data indicate that exon 12 containing Ly1448P splice variants, IRTA2a/b and IRTA5 are overexpressed specifically in CLL at levels that are lower than seen for CD20 but at levels that result in significant protein production. Exon 12 containing Ly1448P splice variants, IRTA2a/b and IRTA5 constitute a CLL-specific diagnostic and therapeutic target. Exon 11 containing Ly1448P splice variants and IRTA1 are not expressed significantly in CLL but are overexpressed in lymphoma. Exon 11 containing Ly1448P splice variants and IRTA1 constitute a lymphoma specific diagnostic and therapeutic target.

### 5.15 Example 15

### Expression of SPAP1a

[0581] This example illustrates the cloning of SPAP1a (Ly1448P variant r) into the expression vector pCEP4 flag. This disclosure also demonstrates that mouse immunization with peptides covering the unique amino terminal 42 amino acid domain of SPAP1a generates production of sera antibody which binds SPAP1 but not irrelevant peptides. These polyclonal sera preferentially bind HEK transfected with the SPAP1a-pCEP4 flag construct over an empty pCEP4 construct, thus demonstrating surface expression of the SPAP-1a molecule. Finally, this example illustrates that both the sera, as well as an anti-flag antibody, identify in western blots an overexpressed 32 kd band in lysates of SPAP1a-pCEP4 flag-transfected HEK cells which is not present in lysates of pCEP4 (empty vector)-transfected HEK cells.

[0582] Expressing SPAP1a in HEK cells revealed that this antigen can be expressed in mammalian cells on the surface and in the total cell. Positive sera titers by ELISA of SPAP1a peptide immunized mice demonstrated the immunogenicity of the antigen.

[0583] Cells expressing SPAP1a may be used as an immunogen for therapeutic monoclonal antibody generation or for use in the generation of SPAP1a specific CTL.

[0584] Full length SPAP1a cDNA template was generated by rt PCR. SPAP1a was PCR-amplified using primers encoding Hind III restriction site 5′ of the ORF (gtaagcttaccatgtgggaatggaaaatatgcaac) (SEQ ID NO:11,294) and a Not I site 3′ of the ORF (ggtagcggccgctgatttcttcacagaagagtagatgac) (SEQ ID NO:11,295). This PCR product was cloned into a TOPO blunt shuttle vector (Invitrogen) containing Hind III and Not I cloning sites and a kanamycin-resistance gene. This material was used to transform chemically competent E. coli, which were plated to kanamycin-containing agarose plates. Following an overnight incubation, a select clone was grown at 37° C. with shaking in 2×YT media and kanamycin. The plasmid DNA was isolated. The plasmid DNA and pCEP4 vector containing a 5″ Hind III cloning site, a flag tag epitope 3′ of the Not I cloning site as described above, and an ampicillin-resistance gene were both digested with Hind III and Not I. Following gel purification, the SPAP1a insert and pCEP4 flag vector were ligated. Chemically competent bacteria were transformed with this product and plated to carbenicillin containing agarose plates. Following an overnight incubation, a select clone was grown at 37° C. with shaking in 2×YT media and carbenecillin. The DNA plasmid were sequenced and a clone was selected for validation.

[0585] An ELISA was performed to determine titers of Anti-SPAP1a antibody contained in the sera of four mice immunized two times with peptides spanning the unique amino terminus of SPAP1a. Peptide 1 contained amino acids 1-25 of SEQ ID NO:11,057, and peptide 2 contained amino acids 20-42 of SEQ ID NO:11,057. Plates were coated with peptides (10 micrograms/ml) of SPAP1a peptides or irrelevant peptides. Plates were blocked with 1% BSA/PBS/Tween 20 (Sigma). Following 6 plate washes, serum dilutions were plated in blocking buffer and incubated. Plates were washed, and then anti-mouse-HRP antibody (1:10,000) was plated. Plates were incubated, then washed again. Plates were developed with peroxidase substrate, then quenched with 1N H₂SO₄, and read for A450-A570. ELISA results demonstrated that sera from mice immunized with SPAP1a peptides 1 and 2 have reactivity to SPAP1a peptides 1 and 2 but not irrelevant peptide at a 1:102400 dilution.

[0586] SPAP1a expression was validated by transient transfection of HEK cells with SPAP1a-pCEP4-flag recombinant vector described above, followed by FACS staining with sera of SPAP1a peptide immunized mice, or western blot probing with the same sera or anti-flag antibody. SPAP1a-pCEP4 flag was validated by transfection of HEK with the construct, followed by flow cytometry to identify surface expression and western blot analysis to identify total expression. Transfection of HEK was performed with two constructs: SPAP1a-pCEP4 flag and pCEP4, which contained neither SPAP1a nor a flag epitope. 2.5 micrograms of DNA and 5 microliters of Lipofectamine 2000 were put into separate tubes containing 125 microliters of Optimem (Gibco) and incubated 5 minutes at room temperature. Then contents were combined and incubated an additional 20 minutes prior to the addition to 90% confluent HEK in a 6-well plate. Following two days of culture at 37° C., samples were harvested and prepared for flow cytometric analysis and western blotting. Flow cytometry samples (100000 cells/well) were washed and stained in PBS+0.5% BSA+10 micrograms/ml anti-human immunoglobulin. Samples were stained with dilutions of sera of SPAP1a peptide-immunized mouse #4 or sera of a mouse-immunized with an unrelated antigen (irrelevant sera) for 30 minutes on ice. Following three washes, samples were stained with a secondary phycoerythrin-conjugated goat anti-mouse immunoglobulin (human immunoglobulin-adsorbed) for 30 minutes on ice. Samples were washed three times before the addition of Pharmingen Via-Probe for the staining of permeabilized cell DNA. Flow cytometry samples were gated so as to collect only the large, dye-impermeable (viable) cells for analysis of phycoerythrin staining. The FACS analysis demonstrate that sera of SPAP1a-peptide immunized mouse #4 preferentially binds SPAP1a-pCEP4 flag-transfected cells over pCEP4-transfected cells, while irrelevant mouse sera does not. West blot samples were prepared by washing the harvested transfected cells three times in PBS before lysing the pellet in media containing Triton X-100 and protease inhibitors. Lysates were centrifuged at 14000 g and the protein containing supernates were harvested. Samples containing supernatants of equivalent numbers of cells received 2-mercaptoethanol and were boiled for 10 miniutes. Samples were loaded onto and SDS-PAGE gel, run 200V×1 hr, and transferred to a membrane at 25V for 30 minutes. The blot was blocked with TBS-0.1% Tween 20+10% milk for 45 minutes. It was cut in half and probed with primary reagents in TBS-Tween 20+1% milk for 1 hour. One half was probed with a mouse anti-flag antibody (3.33 micrograms/ml), the other half with sera of SPAP1a-peptide-immunized mouse #4 (1:100 dilution). Following three washes, the blots were probed with donkey anti-mouse immunoglobulin (H+L)-HRP in TBS-Tween-20-1% milk for 1 hour, and washed 3×. The blot was reassembled and developed with chemiluminescent reagent. SPAP1a was expressed as a dominant band at 32 kd, and is apparent in lanes of SPAP1a-flag/HEK probed by either the anti-flag or the anti-SPAP1a mouse sera, but not in the pCEP4/HEK lanes.

### 6. REFERENCES

[0587] The following references, to the extent that they provide exemplary procedural or other details supplementary to those set forth herein, are specifically incorporated herein by reference.
[0588] U.S. Pat. No. 3,817,827.
[0589] U.S. Pat. No. 3,850,752.
[0590] U.S. Pat. No. 3,901,654.
[0591] U.S. Pat. No. 3,935,074.
[0592] U.S. Pat. No. 3,984,533.
[0593] U.S. Pat. No. 3,996,345.
[0594] U.S. Pat. No. 4,034,074.
[0595] U.S. Pat. No. 4,098,876.
[0596] U.S. Pat. No. 4,235,877.
[0597] U.S. Pat. No. 4,376,110.
[0598] U.S. Pat. No. 4,429,008.
[0599] U.S. Pat. No. 4,436,727.
[0600] U.S. Pat. No. 4,452,901.
[0601] U.S. Pat. No. 4,489,710.
[0602] U.S. Pat. No. 4,507,234.
[0603] U.S. Pat. No. 4,554,101.
[0604] U.S. Pat. No. 4,569,789.
[0605] U.S. Pat. No. 4,603,112.
[0606] U.S. Pat. No. 4,625,014.
[0607] U.S. Pat. No. 4,638,045.
[0608] U.S. Pat. No. 4,671,958.
[0609] U.S. Pat. No. 4,673,562.
[0610] U.S. Pat. No. 4,683,195.
[0611] U.S. Pat. No. 4,699,784.
[0612] U.S. Pat. No. 4,735,792.
[0613] U.S. Pat. No. 4,751,180.
[0614] U.S. Pat. No. 4,769,330.
[0615] U.S. Pat. No. 4,777,127.
[0616] U.S. Pat. No. 4,866,034.
[0617] U.S. Pat. No. 4,873,088.
[0618] U.S. Pat. No. 4,877,611.
[0619] U.S. Pat. No. 4,897,268.
[0620] U.S. Pat. No. 4,912,094.
[0621] U.S. Pat. No. 4,935,233.
[0622] U.S. Pat. No. 5,017,487.
[0623] U.S. Pat. No. 5,075,109.
[0624] U.S. Pat. No. 5,145,684.
[0625] U.S. Pat. No. 5,151,254.
[0626] U.S. Pat. No. 5,215,926.
[0627] U.S. Pat. No. 5,240,856.
[0628] U.S. Pat. No. 5,350,840.
[0629] U.S. Pat. No. 5,359,681.
[0630] U.S. Pat. No. 5,399,346.
[0631] U.S. Pat. No. 5,399,363.
[0632] U.S. Pat. No. 5,466,468.
[0633] U.S. Pat. No. 5,472,869.
[0634] U.S. Pat. No. 5,543,158.
[0635] U.S. Pat. No. 5,552,157.
[0636] U.S. Pat. No. 5,565,213.
[0637] U.S. Pat. No. 5,567,434.
[0638] U.S. Pat. No. 5,633,234.
[0639] U.S. Pat. No. 5,641,515.
[0640] U.S. Pat. No. 5,738,868.
[0641] U.S. Pat. No. 5,741,516.
[0642] U.S. Pat. No. 5,795,587.
[0643] U.S. Pat. No. 5,811,128.
[0644] U.S. Pat. No. 5,814,344.
[0645] U.S. Pat. No. 5,820,883.
[0646] U.S. Pat. No. 5,853,763.
[0647] U.S. Pat. No. 5,874,265.
[0648] U.S. Pat. No. 5,928,647.
[0649] U.S. Pat. No. 5,942,252.
[0650] U.S. Pat. No. 6,110,702.
[0651] European Patent No. EP 0,345,242.
[0652] Great Britain Patent No. GB 2,200,651.
[0653] Intl. Pat. Appl. Publ. No. WO 89/01973.
[0654] Intl. Pat. Appl. Publ. No. WO 89/06280.
[0655] Intl. Pat. Appl. Publ. No. WO 91/02805.
[0656] Intl. Pat. Appl. Publ. No. WO 91/16116.
[0657] Intl. Pat. Appl. Publ. No. WO 92/07243.
[0658] Intl. Pat. Appl. Publ. No. WO 94/00153.
[0659] Intl. Pat. Appl. Publ. No. WO 94/20078.
[0660] Intl. Pat. Appl. Publ. No. WO/94/23701.
[0661] Intl. Pat. Appl. Publ. No. WO 95/17210.
[0662] Intl. Pat. Appl. Publ. No. WO 96/02555.
[0663] Intl. Pat. Appl. Publ. No. WO 96/06638.
[0664] Intl. Pat. Appl. Publ. No. WO 96/30516.
[0665] Intl. Pat. Appl. Publ. No. WO 96/33739.
[0666] Intl. Pat. Appl. Publ. No. WO 97/24447.
[0667] Intl. Pat. Appl. Publ. No. WO 99/33488.
[0668] Aaroston and Todaro, J. Cell. Physiol., 72:141-48, 1968.
[0669] Adelman et al., DNA, 2:183, 1983.
[0670] Amin et al., Am. J. Pathol., 146:344-56, 1995.
[0671] Akaza et al., “Expression of antitumor response. Role of attachment and viability of bacillus Calmette-Guerin to bladder cancer cells,” Cancer, 72:558-63, 1993.
[0672] American Type Culture Collection, Catalogue of Cell Lines and Hybridomas, 7th ed., 1992.
[0673] Avrameas, “Natural autoantibodies: Self-recognition and physiological autoimmunity,” In: Natural autoantibodies: Their Physiological Role and Regulatory Significance, Shoenfeld and Isenberg (eds.), CRC Press, Boca Raton, Fla., pp. 1-14, 1993.
[0674] Azuma et al., “Correlation Between Augmented Resistance to Influenza Virus Infection and Histological Changes in Lung of Mice Treated with Trehalose-6,6′-dimycolate,” Journal of Biological Response Modifiers, 7:473-82, 1988.
[0675] Bajorin et al., Proc. Annu. Meet. Am. Soc. Clin. Oncol., 7:A967, 1988.
[0676] Baker et al., “Ability of Monophosphoryl Lipid A To Augment the Antibody Response of Young Mice,” Infection and Immunity, 56:3064-66, 1988a.
[0677] Baker et al., “Enrichment of Suppressor T Cells by Means of Binding to Monophosphoryl Lipid A,” Infection and Immunity, 58:726-31, 1990.
[0678] Baker et al., “Inactivation of Suppressor T-Cell Activity by Nontoxic Monophosphoryl Lipid A,” Infection and Immunity, 56:1076-83, 1988b.
[0679] Baker et al., “Molecular structures that influence the immunomodulatory properties of the lipid A and inner core region oligosaccharides of bacterial lipopolysaccharides,” Infection Immunity, 62:2257-69, 1994.
[0680] Baker et al., “Structural Features That Influence the Ability of Lipid A and Its Analogs To Abolish Expression of Suppressor T Cell Activity,” Infection and Immunity, 60:2694-701, 1992.
[0681] Bakker et al., “Melanocyte lineage-specific antigen gp100 is recognized by melanoma-derived tumor-infiltrating lymphocytes,” J. Exp. Med., 179:1005, 1994.
[0682] Banchereau and Steinman, Nature, 392:245-51, 1998.
[0683] Banerji et al., “Membrane lipid composition modulates the binding specificity of a monoclonal antibody against liposomes,” Biochim. Biophys. Acta., 689:319-26, 1982.
[0684] Barnd et al., “Specific tumor histocompatibility complex-unrestricted recognition of tumor-associated mucins by human cytotoxic T cells,” Proc. Natl. Acad. Sci. USA, 86:7159, 1989.
[0685] Barnoud et al., Am. J. Surg. Pathol., 24:830-36, 2000).
[0686] Bartlett and Zbar, J. Natl. Cancer Inst., 48:1709, 1972.
[0687] Bast et al., “BCG and Cancer,” N. Engl. J. Med., 290:1413-20,1974.
[0688] Bennett et al., “Endogenous Production of Cytotoxic Factors in Serum of BCG-Primed Mice by Monophosphoryl Lipid A, a Detoxified Form of Endotoxin,” Journal of Biological Response Modifiers, 7:65-76, 1988
[0689] Berkner, Biotechniques, 6:616-27, 1988.
[0690] Berra et al., Int. J. Cancer, 36:363-66, 1985.
[0691] Berra et al., J. Neurochem., 40:777-82, 1983.
[0692] Bogoch, “Demonstration of serum precipitin to brain gangliosides,” Nature, 183:392-93, 1960.
[0693] Bouchon et al., Biochem. Internatl., 10:531-38, 1985.
[0694] Bowen-Pope et al., Proc. Nat'l Acad. Sci. USA, 81:2396-400, 1984.
[0695] Bowness et al., “Clostridium perfringens enterotoxin is a superantigen reactive with human T cell receptors V beta 6.9 and V beta 22,” J. Exp. Med., 176:893-96, 1992.
[0696] Brade et al., “An Artificial Glycoconjugate Containing the Bisphosphorylated Glucosamine Disaccharide Backbone of Lipid A Binds Lipid A Monoclonal Antibodies,” Infection and Immunity, 61:4514-17, 1993.
[0697] Brichard et al., “The tyrosinase gene codes for an antigen recognized by autologous cytolytic T lymphocytes on HLA-A2 melanomas,” J. Exp. Med., 178:489, 1993.
[0698] Brodin et al., “Mouse monoclonal antibodies with specificity for the melanoma-associated ganglioside disialyllactosyl ceramide (GD3) also react with the structural analogue disialylparagloboside,” Biochim. Biophys. Acta., 837:349-53, 1985.
[0699] Brooks et al., Clin. Exp. Immunol., 39: 477, 1980.
[0700] Brown et al., J. Biol. Chem., 255:4980-83, 1980.
[0701] Burchell et al., J. Immunol., 131:508-13, 1983.
[0702] Bystryn et al., Cancer, 61:1065, 1988.
[0703] Cahan et al., “Identification of a human neuroectodermal tumor antigen (OFA-I-2) as ganglioside GD2,” Proc. Natl. Acad. Sci. USA, 79:7629-33, 1982.
[0704] Campbell et al., “Intercellular adhesion molecule-1 expression by bladder cancer cells: functional effects,” J. Urol., 151:1385-90, 1994.
[0705] Campbell, in Monoclonal Antibody Technology, Laboratory Techniques in Biochemistry and Molecular Biology, Vol. 13, Burden and Von Knippenberg (eds.), Amsterdam, Elseview, pp. 75-83, 1984.
[0706] Campbell et al., Int. J. Cancer, 78:182-88, 1998.
[0707] Carr and Morrison, “A two-step mechanism for the interaction of Re lipopolysaccharide with erythrocyte membranes,” Rev. Infect. Dis. 6:497-508, 1984.
[0708] Carubia et al., Biochem. Biophys. Res. Commun., 120:500-04, 1984.
[0709] Chang et al., Crit. Rev. Oncol. Hematol., 22:213, 1996.
[0710] Chase et al., “Effect of Monophosphoryl Lipid A on Host Resistance to Bacterial Infection,” Infection and Immunity, 53(3):711-12, 1986.
[0711] Chen et al., “Activation of Macrophages From Aging Mice by Detoxified Lipid A,” Journal of Leukocyte Biology, 49:416-22, 1991.
[0712] Chen et al., Cancer Res., 54:1065-70, 1994.
[0713] Cheng et al., “Bacillus Calmette-Gerin interacts with the carboxyl-terminal heparin bindings domain of fibronectin: implications for BCG-mediated antitumor activity,” J. Urol., 152:1275-80, 1994.
[0714] Cheresh and Klier, “Disialoganglioside GD3 distributes preferentially into substrate associated microprocesses on human melanoma cells during their attachment to fibronectin,” J. Cell. Biol., 102:1887-97, 1986.
[0715] Cheresh et al., “A monoclonal antibody recognizes an O-acetyl sialic acid in a human melanoma-associated ganglioside,” J. Biol. Chem., 259:7453-59, 1984.
[0716] Cheresh et al., “Disialoganglioside GD3 on human melanoma serves as a relevant target antigen for monoclonal antibody-mediated tumor cytolysis,” Proc. Natl. Acad. Sci. USA, 82:5155-59, 1985.
[0717] Cheresh et al., “Disialogangliosides GD2 and GD3 are involved in the attachment of human melanoma and neuroblastoma cells to extracellular matrix proteins,” J. Cell. Biol., 102:688-96, 1986.
[0718] Cheresh et al., “Localization of gangliosides GD2 and GD3 in adhesion plaques and on the surface of human melanoma cells,” Proc. Natl. Acad. Sci. USA, 81:5767-71, 1984.
[0719] Cheung et al., “Detection of neuroblastoma cells in bone marrow using GD2 specific monoclonal antibodies,” J. Clin. Oncol., 4:363-69, 1986.
[0720] Chu and Sharom, “Gangliosides inhibit T-lymphocyte proliferation by preventing the interaction of interleukin-2 with its cell surface receptors,” Immunology, 79:10-16, 1993.
[0721] Cohen, Science, 259:1691-92, 1993.
[0722] Colcher et al., Proc. Natl. Acad. Sci. USA, 78:3199, 1987.
[0723] Coligan et al., in Current Protocols in Immunology, Vol. 1, Wiley Interscience. Greene (ed.), 1998.
[0724] Coombes et al., Vaccine, 14:1429-38,1996.
[0725] Coulie et al., “A new gene coding for a differentiation antigen recognized by autologous cytologic T lymphocytes on HLA-A2 melanomas,” J. Exp. Med., 180:35, 1994.
[0726] Deavin et al., Mol. Immunol., 33:145-55, 1996.
[0727] DeBruijn et al., Eur. J. Immunol., 21:2963-70, 1991.
[0728] Dippold et al., “Immunohistochemical localization of ganglioside GD3 in human malignant melanoma, epithelial tumors and normal tissues,” Cancer Res., 45:3699-705, 1985.
[0729] Dippold et al., “Inflammatory response at the tumor site after systemic application of monoclonal anti-GD3-ganglioside antibody to patients with malignant melanoma,” Am. Assoc. Cancer Res., 978:247, 1984.
[0730] Dippold et al., Proc. Natl. Acad. Sci. USA, 77:6115, 1980.
[0731] Dresser and Phillips, in Immunopotentiation, CIBA Foundation Symposium 18, Elsevier, Amsterdam, p. 3, 1973.
[0732] Dwivedi et al., “Plasma lipid-bound sialic acid alterations in neoplastic diseases,” Experientia, 46:91-94, 1990.
[0733] Elder, “Skin Cancer,” Cancer, 75:245-56, 1995.
[0734] Elliott et al., “The D-Galactosamine Loaded Mouse and Its Enhanced Sensitivity to Lipopolysaccharide and Monophosphoryl Lipid A: A Role for Superoxide,” J. Immunol., 10:69-74, 1991.
[0735] Euhus et al., Cancer Immunol Immunother., 29:247-54, 1989.
[0736] Fawwaz et al., Statutory Invention Registration Patent No. H819, application no. 6-6-5,439, 1990.
[0737] Fischer, Handb. Lipid Res., 6:123-234, 1990.
[0738] Fisher-Hoch et al., Proc. Nat'l Acad. Sci. USA, 86:317-21, 1989.
[0739] Fitzgerald, “Syphilis vaccine: up-regulation of immunogenicity by cyclophosphamide, Ribi adjuvant, and indomethacin confers significant protection against challenge infection in rabbits,” Vaccine, 9:265-72, 1991.
[0740] Fleischmann, Park and Hassan, “Fibronectin expression on surgical specimens correlated with the response to intravesical bacillus Calmette-Guerin therapy,” J. Urol., 149:268-71, 1993.
[0741] Flexner et al., Ann. N.Y. Acad. Sci., 569:86-103, 1989.
[0742] Flexner et al., Vaccine, 8:17-21, 1990.
[0743] Foster et al., Cancer Res., 57:3325-30, 1997.
[0744] Fraizer et al., Blood, 86:4704-06, 1995.
[0745] Fredman et al., Neurol. Res., 8:123-26, 1986.
[0746] Freimer et al., “Gangliosides elicit a T-cell independent antibody response,” J. Autoimmun., 6:281-89, 1993.
[0747] Freudenberg et al., “ELISA for antibodies to Lipid A, Lipopolyasscharides and other hydrophobic antigens,” Infection, 17:322-24, 1989.
[0748] Gaiger et al., Blood, 96:1334, 2000

[0749] Garg and Subbarao, “Immune Responses of Systemic and Mucosal Lymphoid Organs to Pnu-Immune Vaccine as a Function of Age and the Efficacy of Monophosphoryl Lipid A as an Adjuvant,” Infection and Immunity, 60:2329-36, 1992.
[0750] Gaugler et al., “Human gene MAGE-3 codes for an antigen recognized on a human melanoma by autologous cytolytic T lymphocytes,” J. Exp. Med., 179:921, 1994.
[0751] Gefter et al., Somatic Cell Genet., 3:231-36, 1977.
[0752] Gennaro et al., Am. J. Ind. Med., 37:275-82, 2000.
[0753] Gillard et al., “Antibodies against ganglioside GT₃ in the sera of patients with type I Diabetes mellitus,” J. Immunol., 142:3826-32, 1989.
[0754] Gillis, Nature, 268:154-56, 1977.
[0755] Glynn, McCoy and Fefer, Cancer Res., 28:434-39, 1968.
[0756] Goding, in Monoclonal Antibodies: Principles and Practice, 2d ed., Orlando, Fla., Academic Press, pp. 60-61, 65-66, 71-74, 1986.
[0757] Goff et al., Eur. J. Biochem., 130:553-57, 1983.
[0758] Grabarek et al., “Endotoxic Lipid A Interaction with Human Platelets,” The Journal of Biological Chemistry, 265:8117-21, 1990.
[0759] Graus et al., “Distribution of the ganglioside GD3 in the human nervous system detected by R24 mouse monoclonal antibody,” Brain Res., 324:190-94, 1984.
[0760] Guzman et al., Circulation, 88:2838-48, 1993a.
[0761] Guzman et al., Cir. Res., 73:1202-07, 1993b.
[0762] Hachida et al., Transplant Proc., 22:1663-70, 1990.
[0763] Hachida et al., Transplantation, 56:479-82, 1993.
[0764] Harada et al., Mol. Urol., 3:357-364, 1999.
[0765] Hardings et al., “Effects of pH and polysaccharides on peptide binding to class II major histocompatibility complex molecules,” Proc. Natl. Acad. Sci. USA, 88:2740-44, 1991.
[0766] Harel et al., Cancer Res., 50:6311, 1990.
[0767] Harlow and Lane, Antibodies: A Laboratory Manual, Cold Spring Harbor Laboratory, 1988.
[0768] Helling et al., “Construction of Immunogenic GD₃-conjugate vaccines,” Ann. N.Y. Acad. Sci., 690:396-97, 1993.
[0769] Hellstrom et al., “Strong anti-tumor activities of IgG 3 antibodies to a human melanoma-associated ganglioside,” Proc. Natl. Acad. Sci. USA, 82:1499-1502, 1985.
[0770] Hirabayashi et al, “Syngeneic monoclonal antibody against melanoma antigen with interspecies cross-reactivity recognize GM₃, a prominent ganglioside of B16 melanoma,” Biol. Chem., 260:13328-33, 1985.
[0771] Hirabayashi et al., “Reactivity of mouse monoclonal antibody M2590 against B16 melanoma cells with chemically synthesized GM3 ganglioside,” Biochim. Biophys. Acta, 875:126-28, 1986.
[0772] Hirabayashi et al., Jpn. J. Cancer Res., 78:614-20, 1987.
[0773] Hoon et al., “Gangliosides from melanoma immunomodulate response of T-cells to interleukin-2,” Cell Immunol., 4:1111-19, 1988.
[0774] Horibata and Harris, Exp. Cell. Res., 60:61, 1970.
[0775] Horgan, “Total and lipid-bound sialic acid levels in sera from patients with Cancer,” Clin. Chim. Acta., 118:327-31, 1982.
[0776] Houghten et al., “Mouse monoclonal IgG3 antibody detecting GD3 ganglioside: A phase I trial in patients with malignant melanoma,” Proc. Natl. Acad. Sci. USA, 82:1242-46, 1985.
[0777] Houghton, “Cancer Antigens: Immune Recognition of Self and Altered Self,” J. Exp. Med., 180:1-4, 1994.
[0778] Hraba et al., “The Influence of Monophosphoryl Lipid A (MPL™) on Erythrocyte Autoantibody Formation,” Immunobiol., 189:448-56, 1993.
[0779] Hunter et al., Vaccine, 9:250: 1991.
[0780] Inoue et al., Blood, 88:2267-78, 1996.
[0781] Irie and Morton, “Regression of cutaneous metastatic melanoma by intralesional injection with human monoclonal antibody to ganglioside GD2,” Proc. Natl. Acad. Sci. USA, 83:8694-98, 1986.
[0782] Irie and Ravindranath, “Gangliosides as targets for monoclonal antibody therapy of cancer,” in Therapeutic monoclonal antibodies, Borrebaeck and Larrick (eds.), Stockton Press, New York, p. 75-94, 1990.
[0783] Irie et al., “Human antibody to OFA-I, a tumor antigen, produced in vitro by Epstein-Barr virus transformed human B-lymphoid cell lines,” Proc. Natl. Acad. Sci. USA, 79:5666-70, 1982.
[0784] Irie et al., “Melanoma gangliosides and human monoclonal antibody,” in Human Tumor Antigens and Specific Tumor Therapy, Metzgar and Mitchell (eds.), Alan R. Liss, Inc., New York, pp. 115-126, 1989.
[0785] Ishioka et al., “MHC interaction and T cell recognition of carbohydrates and glycopeptides,” J. Immunol., 148:2446-51, 1992.
[0786] Jackson et al., “Induction of ICAM 1 expression on bladder tumours by BCG immunotherapy,” J. Clin. Pathol., 47:309-12, 1994.
[0787] Johnson and Tomai, “A Study of the Cellular and Molecular Mediators of the Adjuvant Action of a Nontoxic Monophosphoryl Lipid A,” Adv. Exp. Med. Biol., 133:567-79, 1988.
[0788] Johnson et al., “Characterization of a nontoxic monophosphoryl lipid A,” Rev. Infect. Dis., 9:512-16, 1987.
[0789] Johnson et al., “Structural Characterization of Monophosphoryl Lipid A Homologs Obtained from Salmonella minnesota Re595 Lipopolysaccharide,” J. Biol. Chem., 265:8108-16, 1990.
[0790] Johnston and Bystryn, “Effect of Cell Wall Skeleton and Monophosphoryl Lipid A Adjuvant on the Immunogenicity of a Murine B16 Melanoma Vaccine,” Journal of the National Cancer Institute, 83:1240-45, 1991.
[0791] Jones et al., J Natl Cancer Inst, 66:249-54, 1981.
[0792] Kabat et al., “Sequences of Proteins of Immunological Interest,” 5th ed., Public Health Service, National Institutes of Health, Bethesda, Md., pp 647-669, 1991.
[0793] Kass-Eisler et al., Proc. Nat'l Acad. Sci. USA, 90:11498-502, 1993.
[0794] Katopodis et al., “Lipid-associated sialic acid test for the detection of human cancer,” Cancer Res., 42:5270-75, 1982.
[0795] Kawaguchi et al., “Characteristic mode of action of gangliosides in selective modulation of CD4 on human T lymphocytes,” Biochem. Biophys. Res. Commun., 158:1050-55, 1989.
[0796] Kawakami et al., “Cloning of the gene coding for a shared human melanoma antigen recognized by autologous T cells infiltrating into tumor,” Proc. Natl. Acad. Sci. USA, 91:3515, 1994.
[0797] Kawakami, Eliyahu, Sakaguchi, Robbins, Rivoltini, Yannelli, Appella and Rosenberg, “Identification of the immunodominant peptides of the Mart-1 human melanoma antigen recognized by the majority of HLA-A2 restricted tumor infiltrating lymphocytes,” J. Exp. Med., 180:347-52, 1994.
[0798] Kensil et al., J. Am. Vet. Med. Assoc., 199:1423, 1991.
[0799] Kloppel et al., “Glycolipid-bound sialic acid in serum: Increased levels in mice and humans bearing mammary carcinomas,” Proc. Natl. Acad. Sci. USA, 74:3011-13, 1977.
[0800] Kohler and Milstein, Nature, 256:495-97, 1975.
[0801] Kohler and Milstein, Eur. J. Immunol., 6:511-19, 1976.
[0802] Kolls et al., Proc. Nat'l Acad. Sci. USA, 91:215-19, 1994.
[0803] Koscielak et al., “Glycolipid antigen and its antibody,” Immunochemistry, 5:441-55, 1968.
[0804] Kovach et al., “Lipid IV_{A} Inhibits Synthesis and Release of Tumor Necrosis Factor Induced by Lipopolysaccharide in Human Whole Blood Ex Vivo,” J. Exp. Med., 172:77-84, 1990.
[0805] Kwok and Higuchi, Nature, 339:237-38, 1989.
[0806] Kyogashima et al., Jpn. J. Cancer Res., 78:1229-32, 1987.
[0807] Ladisch et al., “Shedding of GD2 ganglioside by human neuroblastoma,” Int. J. Cancer, 39:73-76, 1987.
[0808] Lamm et al., “A randomized trial of intravesical doxorubicin and immunotherapy with bacille Calmette-Guerin for transitional-cell carcinoma of the bladder,” N. Engl. J. Med., 325:1205, 1991.
[0809] Lengle et al., “Inhibition of the lectin-induced mitogenic response of thymocytes by glycolipids,” Cancer Res., 39:817-922, 1979.
[0810] Liepkalns et al., J. Neurochem., 36:1959-65, 1981.
[0811] Livingston et al., “The Serologic Response to Meth A Sarcoma Vaccines After Cyclophosphamide Treatment is Additionally Increased by Various Adjuvants,” The Journal of Immunology, 135(2):1505-09, 1985.
[0812] Livingston et al., “Approaches to augmenting immunogenicity of the ganglioside GM₂ in mice: purified GM₂ is superior to whole cells,” J. Immunol., 138:1524-29, 1987a.
[0813] Livingston et al., “Vaccines containing purified GM₂ gangliosides elicit GM₂ antibodies in melanoma patients,” Proc. Natl. Acad. Sci. USA, 84:2911-15, 1987b.
[0814] Ljunggren et al., Nature, 346:476-80, 1990.
[0815] Lozzio and Lozzio, Blood, 45:321-34, 1975.
[0816] Madonna and Vogel, “Induction of Early-Phase Endotoxin Tolerance in Athymic (Nude) Mice, B-Cell-Deficient (xid) Mice, and Splenectomized Mice,” Infection and Immunity, 53:707-10, 1986.
[0817] Mahvi et al., Immunology and cell Biology, 75:456-60, 1997.
[0818] Maratea et al., Gene, 40:3946, 1985.
[0819] Masihi et al., “Effects of Nontoxic Lipid A and Endotoxin on Resistance of Mice to Toxoplasma gondii,” Journal of Biological Response Modifiers, 7:535-39, 1988
[0820] Melling et al., J. Immunol., 117:1267-74, 1976.
[0821] Menssen et al., J. Cancer Res. Clin. Oncol., 126:226-32, 2000.
[0822] Merrifield, J. Am. Chem. Soc., 85:2149-46, 1963.
[0823] Miller and Esselman, “Modulation of immune response by antigen reactive lymphocytes after cultivation with gangliosides,” J. Immunol., 115:839-43, 1975.
[0824] Minden, “Shared Antigens Between Animal and Human Tumors and Microorganisms,” in BCG in Cancer Immunotherapy, Lamoureux, Turcotte and Portelance (eds.); pp. 73-81, 1976.
[0825] Miotti et al., Cancer Res., 65:826, 1985.
[0826] Mitchell et al., “Active specific Immunotherapy of melanoma with allogeneic cell lysates: Rationale, results and possible mechanisms of action,” Ann. N.Y. Acad. Sci., 690:153-66, 1993.
[0827] Mitchell et al., “Active specific immunotherapy of melanoma: Phase I trial of allogeneic lysates and a novel adjuvant,” Cancer Res., 48:5883-93, 1988.
[0828] Mitchell et al, “Active-Specific Immunotherapy for Melanoma,” Journal of Clinical Oncology, 8:856-59, 1990.
[0829] Miyake et al., Cancer Res., 48:6154-60, 1988.
[0830] Mooney et al, “Bacterial superantigen signaling via HLA class II on human B lymphocytes,” Mol. Immunol., 31:675-81, 1994.
[0831] Morrison et al., “Specific ganglioside binding to receptor sites on T lymphocytes that couple to ganglioside-induced decrease of CD4 expression,” Life Sci., 45:1219-24, 1989.
[0832] Morton and Ravindranath, in Cancer Medicine, 3rd ed., Holland et al. (eds.), Lea and Febiger, Philadelphia, p. 967, 1993.
[0833] Morton et al., “Polyvalent Melanoma Vaccine Improves Survival of Patients with Metastatic Melanoma,” John Wayne Cancer Institute at Saint John's Hospital and Health Center, Santa Monica, Calif., reprinted from Specific Immunotherapy of Cancer with Vaccines, Volume 690 of the Annals of the New York Academy of Sciences, 1993.
[0834] Morton et al., Ann. Surg., 216:463, 1992.
[0835] Morton et al., in Biological Function of Gangliosides, Progress in Brain Research, Vol. 101, pp 251-275, 1994.
[0836] Mosmann and Coffman, Ann. Rev. Immunol., 7:145-73, 1989.
[0837] Munjal et al., “Combined measurement and significance of lipid-bound sialic acid and carcinoembryonic antigen in detection of human cancer,” Diagn. Immunol., 2:36-43, 1984.
[0838] Murphy et al., Proc. Natl. Acad. Sci. USA, 83:8258-62, 1986.
[0839] Myers et al., “Monophosphoryl Lipid A Behaves as a T-Cell-Independent Type 1 Carrier for Hapten-Specific Antibody Responses in Mice,” Infection and Immunity, 63:168-74, 1995.
[0840] Naiki et al., “Properties of antisera to ganglioside GM₁ and Asialo GM₁”, J. Immunol., 113:84-93, 1974.
[0841] Nair et al., Nature Biotechnol., 16:364-69, 1998.
[0842] Natoli et al., “A murine monoclonal antibody detecting the ganglioside GM2: Characterization of cell surface reactivity,” Cancer Res., 46:4116-20, 1986.
[0843] Nonomura et al., Hinyokika Kiyo, 45:593-97, 1999.
[0844] Nudelman et al., “Characterization of a human melanoma-associated ganglioside antigen defined by a monoclonal antibody 4.2,” J. Biol. Chem., 257:12752-56, 1982.
[0845] Odean et al., “Involvement of Gamma Interferon in Antibody Enhancement by Adjuvants,” Infection and Immunity, 58:427-32, 1990.
[0846] Oji et al., Jpn. J. Cancer Res., 90:194-204, 1999.
[0847] Old et al., Ann. N.Y. Acad. Sci., 101:80-106, 1962.
[0848] Pan et al., Leukemia, 14:1634, 2000.
[0849] Parker et al., J. Immunol., 152:163, 1994.
[0850] Pascal et al., “Immunochemical studies on normal and Tay-Sachs' brain gangliosides,” Proc. Soc. Exp. Biol. Med., 121:739-43, 1966.
[0851] Patek, Collins and Cohn, “Transformed cell lines susceptible or resistant to in vivo surveillance against tumorigenesis,” Nature, 276:510-11, 1978.
[0852] Patmasiriwat et al., Leukemia, 13:891-900, 1999.
[0853] Paul, Fundamental Immunology, 3rd ed., Raven Press, pp. 243-47, 1993.
[0854] Portoukalian et al., “Humoral immune response in disease-free advanced melanoma patients after vaccination with melanoma-associated gangliosides,” Int. J. Cancer, 49:893-99, 1991.
[0855] Portoukalian, “Alteration of gangliosides in plasma and red cells of human bearing melanoma tumors,” Biochem. Biophys. Res. Commun., 85:916-20, 1978.
[0856] Portoukalian, “Immunoregulatory activity of gangliosides shed by melanoma tumors,” in Gangliosides and Cancer, Oettgen (ed.), New York, VCH Publishers, pp. 207-16, 1989.
[0857] Powell and Newman (eds.), “Vaccine Design (the subunit and adjuvant approach),” Plenum Press, NY, 1995.
[0858] Prokazova et al., “Sialylated lactosylceramides. Possible inducers of non-specific immunosuppression and atherosclerotic lesions,” Eur. J. Biochem., 171:1-10, 1988.
[0859] Pukel et al., “GD3, a prominent ganglioside of human melanoma: Detection and characterization of mouse monoclonal antibody,” J. Exp. Med., 155:1133-47, 1982.
[0860] Qureshi et al., “Purification and structural determination of nontoxic lipid A obtained from the Lipopolysaccharide of Salmonella typhimurium,” J. Biol. Chem., 257:11808-15, 1985.
[0861] Rabinovich et al., “Vaccine Technologies: View to the Future,” Science, 265:1401-02, 1994.
[0862] Raines and Ross, J. Biol. Chem., 257:5154-60, 1982.
[0863] Rapport and Graf, “Immunochemical Reactions of Lipids,” Prog. Allergy, 13:273-331, 1969.
[0864] Ravindranath and Irie, in Malignant Melanoma: Biology, Diagnosis, and Therapy, Nathanson (ed.), Kluwer Acad., Boston, p. 17, 1988.
[0865] Ravindranath and Morton, “Role of gangliosides in active immunotherapy with melanoma vaccine,” Int. Rev. Immunol., 7:303, 1991.
[0866] Ravindranath et al., “Human melanoma antigen O-acetylated Ganglioside GD₃ is recognized by Cancer antennarius lectin,” J. Biol. Chem., 263:2079-86, 1988.
[0867] Ravindranath et al., “An epitope common to gangliosides O-acetyl GD3 and GD3 recognized by antibodies in melanoma patients after active specific immunotherapy,” Cancer Res., 49:3891-97, 1989.
[0868] Ravindranath et al., “Ganglioside GM₃:GD₃ Ratio as an Index for the Management of Melanoma,” Cancer, 67:3029-35, 1991.
[0869] Ravindranath et al., “Efficacy of tumor cell vaccine after incorporating monophosphoryl lipid A (MPL) in tumor cell membranes containing tumor-associated ganglioside,” Experientia, 50:648-653, 1994a.
[0870] Ravindranath et al., “Attachment of Monophosphoryl Lipid A (MPL) to Cells and Liposomes Augments Antibody Response to membrane-bound Gangliosides,” Journal of Autoimmunity, 7:803-16, 1994b.
[0871] Ravindranath et al., “Factors affecting the fine specificity and sensitivity of serum antiganglioside antibodies in ELISA,” J. Immunol. Methods, 169:257-72, 1994c.
[0872] Real et al., “Class I (unique) tumor antigens of human melanoma. Identification of a 90,000 dalton cell surface glycoprotein by autologous antibody,” J. Exp. Med., 160:1219, 1984.
[0873] Reeves et al., Cancer Res., 56:5672-77, 1996.
[0874] Reisfeld et al., Melanoma Antigens and Antibodies, p. 317, 1982.
[0875] Ribi, “beneficial modification of the endotoxin molecule,” J. Biol. Resp. Mod., 3:1-9, 1984.
[0876] Ribi et al., “Lipid A and immunotherapy,” Rev. Infect. Dis., 6:567-72, 1984.
[0877] Ribi et al., “Modulation of humoral and cell mediated immune responses by a structurally established nontoxic lipid A,” in Immunobiology and Immunopharmacology of Bacterial Endotoxins, Szentivanji and Friedman (eds.), Plenum Press, New York, pp. 407-420, 1986.
[0878] Rickman et al., Lancet 337:998, 1991.
[0879] Rolland, Crit. Rev. Therap. Drug Carrier Systems, 15:143-98, 1998.
[0880] Rosenberg et al., Ann. Surg., 210:474, 1989.
[0881] Rosenberg et al., N. Engl. J. Med., 319:1676, 1988.
[0882] Rosenfeld et al., Science, 252:431-34, 1991.
[0883] Rothbard and Taylor, EMBO J, 7:93-100, 1988.
[0884] Rott et al., “Protection from experimental allergic encephalomyelitis by application of a bacterial superantigen,” Int. Immunol., 4:347-53, 1992.
[0885] Sato et al., “Cytoplasmic membrane-associated protein (CAP) isolated from Streptococcus pyrogenes: as a new bacterial superantigen,” Microbiol. Immunol., 38:139-47, 1994.
[0886] Sato et al., Science, 273:352, 1996.
[0887] Satoh et al., Pathol. Int., 50:458-71, 2000.
[0888] Schuster et al., “Production of antibodies against phosphocholine, phosphatidylcholine, sphingomyelin, and lipid A by injection of liposomes containing lipid A,” J. Immunol, 122:900-05, 1979.
[0889] Schwab et al., “Superantigen can reactivate bacterial cell wall-induced arthritis,” J. Immunol., 150:4151-59, 1993.
[0890] Shafer and Spitznagel, “Sensitivity of Salmonella typhimurium to polymorphonuclear granulocyte extracts: Role of lipid A,” Rev. Infect. Dis., 6:577-81, 1984.
[0891] Shepard et al., J. Clin. Immunol., 11:117-27, 1991.
[0892] Sherwin et al., “The production of antisera to gangliosides from human nervous tissue,” Canad. J. Biochem., 42:1640-48, 1964.
[0893] Shimizu et al., Int. J. Gynecol. Pathol., 19:158-63, 2000.
[0894] Shy et al., “Antibodies to GM₁ and GD_{1b} in patients with motor neuron disease with plasma cell dyscrasia,”. Ann. Neurol., 25:511-18, 1989.
[0895] Siddiqui et al., Cancer Res., 44:5262-65, 1984.
[0896] Sidell et al., Cancer Immunol Immunother, 7:151-55, 1979.
[0897] Sigma Cell Culture, Volume 9, Number 2, 1993.
[0898] Skeiky et al., Infection and Immun., 67:3998-4007, 1999.
[0899] Slavin and Strober, Nature, 272:624-26, 1977.
[0900] Spinsanti et al., Leuk. Lymphoma, 38:611-19, 2000.
[0901] Stiess and Krüger, “Mammalian Cell Culture Media—Overview and Applications,” The Source (Sigma Cell Culture Technical and Product News), 9:1-8, 1993.
[0902] Stoute et al. New Engl. J. Med., 336:86-91, 1997.
[0903] Svennerholm et al., “Tumor gangliosides as targets for active specific immunotherapy of melanoma in man,” in Biological Function of Gangliosides, Progress in Brain Research, Vol. 101, 1994.
[0904] Tai et al., “Ganglioside GM2 as a human tumor antigen (OFA-I-1),” Proc. Natl. Acad. Sci., 80:5392-96, 1983.
[0905] Takada et al., “Molecular and Structural Requirements of a Lipoteichoic Acid from Enterococcus hirae ATCC 9790 for Cytokine-Inducing, Antitumor, and Antigenic Activities,” Infection and Immunity, 63:57-65, 1995.
[0906] Takahashi et al., J. Immunol., 140:3244, 1988.
[0907] Tamaki et al., Leukemia, 13:393-99, 1999.
[0908] Tamauchi et al., Immunology, 50:605, 1983.
[0909] Tanamoto, “Dissociation of Endotoxic Activities in a Chemically Synthesized Lipid A Precursor after Acetylation,” Infection and Immunity, 63:690-92, 1995.
[0910] Tanamoto, “Free Hydroxyl Groups Are Not Required for Endotoxic Activity of Lipid A,” Infection and Immunity, 62:1705-09, 1994a.
[0911] Tanamoto, FEBS Lett., 351:325-29, 1994b.
[0912] Tautu et al., “Improved procedure for determination of serum lipid-associated sialic acid: Application for early diagnosis of colorectal cancer,” J. Natl. Cancer Inst., 80:1333-37, 1988.
[0913] Thor et al., Cancer Res., 46:3118, 1986.
[0914] Thurin et al., “Proton NMR and fast-atom bombardment mass spectrometry analysis of the melanoma-associated ganglioside 9-O-acetyl GD3,” J. Biol. Chem., 260:14556-563, 1985.
[0915] Timmerman and Levy, Ann. Rev. Med., 50:507-29, 1999.
[0916] Tomai and Johnson, “T Cell and Interferon-γ Involvement in the Adjuvant Action of a Detoxified Endotoxin,” Journal of Biological Response Modifiers, 8:625-43, 1989.
[0917] Tomai et al., “The Adjuvant Properties of a Nontoxic Monophosphoryl Lipid A in Hyporesponsive and Aging Mice,” Journal of Biological Response Modifiers, 6:99-107, 1987.
[0918] Tsuchida et al., J. Dermatol., 11:129-38, 1984.
[0919] Tsuchida et al., “Gangliosides of Human Melanoma: Altered Expression in Vivo and in Vitro,” Cancer Research, 47:1278-81, 1987.
[0920] Tsuchida et al., “Gangliosides as tumor markers of human melanoma: bio-chemical and immunologic assays,” in New Horizons of Tumor Immunotherapy, Torisu and Yoshida (eds.), pp. 315-325, 1989.
[0921] Tuting et al., J. Immunol., 160:1139-47, 1998.
[0922] Ulmer et al., Science, 259:1745-49, 1993.
[0923] Vadhan-Raj et al., J. Clin. Oncol., 6:1636, 1988.
[0924] van der Bruggen et al., “A gene encoding an antigen recognized by cytolytic T lymphocytes on a human melanoma,” Science, 264:716, 1991.
[0925] Verma et al., “Adjuvant Effects of Liposomes Containing Lipid A: Enhancement of Liposomal Antigen Presentation and Recruitment of Macrophages,” Infection and Immunity, 60:2438-44, 1992.
[0926] Vijayasaradhi et al., “The melanoma antigen gp75 is the human homologue of the mouse b (brown) locus gene product,” J. Exp. Med., 171:1375, 1990.
[0927] Von Bultzingslowen, Pneumologie, 53:266-75, 1999.
[0928] Vosika et al., Cancer Immunol. Immunother., 18:107, 1984.
[0929] Watson, Ralph, Sarkar and Cohn, “Leukemia viruses associated with mouse myeloma cells,” Proc. Natl. Acad. Sci. USA, 66:344, 1970.
[0930] Westrick et al., Biochim. Biophys. Acta, 750:141-48, 1983a
[0931] Westrick et al., Cancer Res., 43:5890-94, 1983b
[0932] Whisler and Yates, “Regulation of lymphocyte responses by human gangliosides. I. Characteristics of inhibitory effects and the induction of impaired activation,” J. Immuunol., 125:2106-12, 1980.
[0933] Wide et al., in Radioimmunoassay Methods, Kirkham and Hunter (eds.), E. and S. Livingstone, Edinburgh, 1970.
[0934] Wilschut, “Preparation and properties of phospholipid vesicles,” in Methodologie des liposomes apptiquee a la pharmacologie et a la biologies cellulaire, Leserman and Barbet (eds.), INSERM, Paris, pp. 1-10, 1982.
[0935] Yamaguchi et al., “Cell-surface antigens of melanoma recognized by human monoclonal antibodies,” Proc. Natl. Acad. Sci. USA, 84:2416-20, 1987.
[0936] Yamamoto et al., “In vitro Augmentation of Natural Killer Cell Activity and Production of Interferon-α/β and -γ with Deoxyribonucleic Acid Fraction from Mycobacterium bovis BCG,” Jpn. J. Cancer Res., 79:866-73, 1988.
[0937] Yeh et al., “A cell-surface antigen which is present in the ganglioside fraction and shared by human melanomas,” Int. J. Cancer, 29:269-75, 1982.
[0938] Yin et al., “Effect of Various Adjuvants on the Antibody Response of Mice to Pneumococcal Polysaccharides,” J. Biol. Resp. Modifiers, 8:190-205, 1989.
[0939] Yokoyama et al., “Immunochemical studies with gangliosides,” J. Immunol., 90:372-80, 1963.
[0940] Zapata et al., Protein Eng., 8:1057-62, 1995.
[0941] Zitvogel et al., Nat. Med., 4:594-600, 1998.

[0942] All of the compositions and methods disclosed and claimed herein can be made and executed without undue experimentation in light of the present disclosure. While the compositions and methods of this invention have been described in terms of preferred embodiments, it will be apparent to those of skill in the art that variations may be applied to the composition, methods and in the steps or in the sequence of steps of the method described herein without departing from the concept, spirit and scope of the invention. More specifically, it will be apparent that certain agents which are both chemically and physiologically related may be substituted for the agents described herein while the same or similar results would be achieved. All such similar substitutes and modifications apparent to those skilled in the art are deemed to be within the spirit, scope and concept of the invention as defined by the appended claims. All publications, patents, and patent applications cited herein are hereby incorporated by reference in their entirety for all purposes. Accordingly, the exclusive rights sought to be patented are as described in the claims below:

1-21. (canceled)

22. An isolated monoclonal antibody that specifically binds to a polypeptide encoded by a nucleic acid sequence set forth in SEQ ID NO: 9601.

23. A nucleic acid encoding the monoclonal antibody of claim 22.

24. The monoclonal antibody of claim 22, wherein said monoclonal antibody specifically binds to amino acids 1-42 of the polypeptide encoded by a nucleic acid sequence set forth in SEQ ID NO: 9601.

25. A pharmaceutical composition comprising a monoclonal antibody according to claim 22 and a pharmaceutically acceptable carrier.

26. The monoclonal antibody of claim 22, wherein said antibody is a chimeric antibody.

27. The monoclonal antibody of claim 22, wherein said antibody is a Fab fragment.

28. The monoclonal antibody of claim 22, wherein said antibody is a Fv fragment.

29. The monoclonal antibody of claim 22, wherein said antibody is a scFv.

30. The monoclonal antibody of claim 22 further comprising a reporter group.

31. The monoclonal antibody of claim 22 further comprising a therapeutic moiety.

32. The monoclonal antibody of claim 31, wherein the therapeutic moiety is a radionuclide.

33. A pharmaceutical composition comprising a monoclonal antibody of claim 22, and a pharmaceutically acceptable carrier.

34. Use of an effective amount of a pharmaceutical composition comprising an isolated monoclonal antibody that specifically binds to a polypeptide encoded by a nucleic acid sequence set forth in SEQ ID NO: 9601 and a pharmaceutically acceptable carrier in the manufacture of a medicament for treatment of a hematological malignancy in a mammalian subject.

35. The method of claim 34, wherein the hematological malignancy is associated with overexpression of SPAP.

36. The method of claim 34, wherein the hematological malignancy is selected from the group consisting of lymphoma, B cell leukemia, multiple myeloma, and combinations thereof.

37. The method of claim 34, wherein the hematological malignancy is chronic lymphocytic leukemia.

38. The method of claim 34, wherein the mammalian subject is a human.

39. The method of claim 34, wherein the administration is intravenous.

40. A method for the detection of a hematological malignancy in a patient, said method comprising:
(a) contacting a biological sample from the patient with a monoclonal antibody that specifically binds to a polypeptide encoded by a nucleic acid sequence set forth in SEQ ID NO: 9601, whereby said monoclonal antibody forms a complex with a polypeptide encoded by SEQ ID NO:9601
(b) detecting the amount of said complex, thereby detecting cancer in said patient.

41. The method of claim 40, wherein the hematological malignancy is selected from the group consisting of: lymphoma, B cell leukemia, and multiple myeloma, and combinations thereof.

42. The method of claim 40, wherein the hematological malignancy is chronic lymphocytic leukemia

43. A kit for detecting a hematological malignancy cell, said kit comprising:
a monoclonal antibody that specifically binds to a polypeptide encoded by a nucleic acid sequence set forth in SEQ ID NO: 9601; and
instructions for use.

The application's sequence listing, which the Patent Office published only in electronic form, follows.

SEQUENCE LISTING (11295 sequences)

SEQ ID NO: 1-9597 - skipped (9597 entries)

SEQ ID NO: 9598 - DNA, 622 bp, Homo sapiens
gcacacaaattgacttattagaaggcaatgtagcatcaggaaaagtagatgtgaatgaacagagtggtcagaggagaagttgtatttggttgaaccttgaaattaaaaatgatagaggaattattattgggaccgttgttaggaataatgacttttccactgcaagactgaagatatcagtgcccctctatattctgtgcaaaaggtgtctttgactcatccaaaaaattgaacagtttcctgtctcatggagatctatcacaaagtctttaaatattactacccatgaaattggccagggttaggacattcaaatgtctttatccacattcctgaaggataattgttatagattccctacctccataggaatgcttataatggattatctatacaatctccacattcccacattttgcattagagaatggaatcagtcaaaccctgttcccagagtttcccttagagttctcacctgttgtcttatatccatctaggaatccccatctctaatgtaagcttggagatccgggcccccgggggacaggtgactgaaggacaaaaactgatcctgctctgctcagtggctgagggtacaggaaatgtcacattctcctggtac

SEQ ID NO: 9599 - DNA, 523 bp, Homo sapiens
ctgtcatgaggtctcttctatagccatcaggtcttctcacagggatattcaccaccttgctctggataggcacatggccgttgtcagctctacagtaatatttgccggcatcactctctttcacagctgggatctccagctctgctgacagggaacgctgggttttctttcccatactggttcctgtggcctctctgtaccaggagaatgtgacatttcctgtacccccagccactgagcagagcaggatcagtttttgtccttcagtcacctgtcccccgggggcccggatctccaagcttacattagagatggggattcctagatggatataagacaacaggtgagaactctaagggaaactctgggaacagggtttgactgattccattctctaatgcaaaatgtgggaatgtggagattgtatagataatccattataagcattcctatggaggtagggaatctataacaattatccttcaggaatgtggataaagacatttgaatgtcctaaccctgg

SEQ ID NO: 9600 - DNA, 1908 bp, Homo sapiens
  misc_feature (1)...(1908): n = A,T,C or G
gacactcaacttcacagtgcctactggggccagaagcaatcatcttacctcaggagtcattgaggggctgctcagcacccttggnccagccaccgtggccttattattttgctacggcctcaaaagaaaaataggaagacgttcagccagggatccactcaggagccttcccagccctctaccccaagagttcacctacctcaactcacctaccccagggcagctacagcctatatatgaaaatgtgaatgttgtaagtggggatgaggtttattcactggcgtactataaccagccggagcaggaatcagtagcagcagaaaccctggggacacatatggaggacaagatgcagtcactgaacaggcagattcgctgacccttgtggcgccctcttctgtcttcgaaggagacagcatcgttctgaaatgccagggagaacagaactggaaaattcagaagatggcttaccataaggataacaaagagttatctgttttcaagaaaattctcagatttccttatccaaagtgcagttttaagtgacagtggtaactatttctgtagtaccaaaggacaactctttctctgggataaaacttcaaatatagtaaagattaaaagtccaaggaatccccatctctaatgtaagcttggagatccgggcccccgggggacaggtgactgaaggacaaaaactgatcctgctctgctcagtggctgggggtacaggaaatgtcacattctcctggtacagagaggccacaggaaccagtatgggaaagaaaacccagcgttccctgtcagcagagctggtagatcccagctgtgaaagagagtgatgccggcaaatattactgtagagctgacaacggccatgtgcctatccagagcaaggtggtgaatatccctgtgagaattccagtgtctcgccctgtcctcacccctcaggtctcctggggcccaggctgcagtgggggacctgctggagcttcactgtgaggcccctgagaggctctcccccaatcttgtaccaattttatcatgaggatgtcacccttgggaacagctcggcccctctggaggaggggcctccttcaacctctctttgactgcagaacattctggaaactactcctgtgaggccaacaacggcctgggggcccagtgcaggtggagggcagtgccaggtcctccatctcaggacctgatggctatagaaagagacctcatgacagctggagttctctggggacctgtttggtgtccttgcgttcactgggtgttgctttgctgttgtatgccttgttccacaagatatcaggagaaagttctgccactaatgaacccagaggggcttccaggccaaatcctcaagagttcacctattcaagcccaaccccagacatggaggagctgcagccacgtgtatgtcaatgtgggctctgtagatgtggatgtggtttattctcaggtctggagcatgcagcagccagaaagctcagcaaacatcaggacacttctggagaacaaggactcccaagtcatctactcttctgtgaagaaatcataacacttggaggaatcagaagggaagatcaacagcaaggatggggcatcattaagacttgctataaaaccttatgaaaatgcttgaggcttatcacctgccacagccagaacgtgcctcaggaggcacctcctgtcatttttgtcctgatgatgtttcttctccaatatcttcttttacctatcaatattcattgaactgctgctacatccagacactgtgcaaataaattatttctgctaccttctcttaagcaatcagtgtgtaaagatttgagggaagaatgaataagagatacaaggtctcaccttcatctactgtgaagtgatgagaacagg

SEQ ID NO: 9601 - DNA, 1329 bp, Homo sapiens
ccacgcgtccggtcctgaactgggctgaataaacatacctaaatatatgtttagaaatgctcctatgtatcagttttcccaggaacaactataatattatagaaatcttaaaattatttcctaataaaaaattataggatacaaaagaaaaaaaagaaatatgaagagggctggatgggcacaggaaaacaatcagatgagaacaacagatgaccgtgtctgcaggcagcacccagaactgatattcccctcaaacgtctaaatatattgttgagaaaattatctctaactgttctagtgggaatgtgggaatggaaaatatgcaacagccatggggccaggccctttgctgagcctgcaggttgggagtttgtgaatctattgaggcatcacaaatcttttctgatagcccctctgtgtctgtcagttccagtgtctcgccctgtcctcaccctcaggtctcctggggcccaggctgcagtgggggacctgctggagcttcactgtgaggccctgagaggctctcccccaatcttgtaccaattttatcatgaggatgtcacccttgggaacagctcggccccctctggaggaggggcctccttcaacctctctttgactgcagaacattctggaaactactcctgtgaggccaacaacggcctgggggcccagtgcagtgaggcagtgccagtctccatctcaggacctgatggctatagaagagacctcatgacagctggagttctctggggactgtttggtgtccttggtttcactggtgttgctttgctgttgtatgccttgttccacaagatatcaggagaaagttctgccactaatgaacccagaggggcttccaggccaaatcctcaagagttcacctattcaagcccaaccccagacatggaggagctgcagccagtgtatgtcaatgtgggctctgtagatgtggatgtggtttattctcaggtctggagcatgcagcagccagaaagctcagcaaacatcaggacacttctggagaacaaggactcccaagtcatctactcttctgtgaagaaatcataacacttggaggaatcagaagggaagatcaacagcaaggatggggcatcattaagacttgctataaaaccttatgaaaatgcttgaggcttatcacctgccacagccagaacgtgcctcaggaggcacctcctgtcatttttgtcctgatgatgtttcttctccaatatcttcttttacctatcaatattcattgaactgctgctacatccagacactgtgcaaataaattatttctgctaccttaaaaaaaaaaaaaaa

SEQ ID NO: 9602 - DNA, 1569 bp, Homo sapiens
  misc_feature (1)...(1569): n = A,T,C or G
tgctgccaaatgggacagcacacagcctgtgcacatactgacatgtgatgggtctccccacgggggctgcatttcacactcctccacctntctcaaactctaaggtcggcacttgacaccaaggtaacttctctcctgctcatgtgtcagtgtctacctgcccaagtaagtggctttcatacaccaagtcccaagttcttcccatcctaacagaagtaacccagcaagtcaaggccaggaggaccaggggtgcagacagaacacatactggaacacaggaggtgctcaattactatttgactgactganaaaaatgnntgantgattgaggaagaaaactgtgggtaatcaaactggcataaaatccagtgcactccctaggaaatccgggaggtattctggcttccctaagaaacaacggaagagaaggagcttggatgaggaaactgttcagcaagaggaagggcttctcacactttcatgtgcttgtggatcacctgaggatcctgtgaaaatacagatactgattcagtgggtctgcgtagagcctgagactgccattctaacatgttcccaggggatgctgatgctgctggccctgggactgcactgcatgcatgtgaagccctataggtctcagcagaggcccatggagagggaatgtgtggctctggctgcccagggcccaactcggttcacacggatcgtgctgctccctggccagcctttggccacagcaccaccagctgctgttgctgagagagcttcttctctgtgacatgttggctttcatcagccaccctgggaagcggaaagtagctgccactatctttgtttccccacctcaggcctcacactttcccatgaaaagggtgaatgtatataacctgagccctctccattcagagttgttctcccatctctgagcaatgggatgttctgttccgcttttatgatatccatcacatcttatcttgatctttgctcccagtggattgtacagtgatgacttttaagccccacggccctgaaataaaatccttccaagggcattggaagctcactccacctgaaccatggcttttcatgcttccaagtgtcagggccttgcccagatagacagggctgactctgctgccccaacctttcaaggaggaaaccagacacctgagacaggagcctgtatgcagcccagtgcagccttgcagaggacaaggctggaggcatttgtcatcactacagatatgcaactaaaatagacgtggagcaagagaaatgcattcccaccgaggccgcttttttaggcctagttgaaagtcaagaaggacagcagcaagcataggctcaggattaaagaaaaaatctgctcacagtctgttctggaggtcacatcaccaacaaagctcacgccctatgcagttctgagaaggtggaggcaccaggctcaaaagaggaaatttagaatttctcattgggagagtaaggtacccccatcccagaatgataactgcacagtggcagaacaaactccaccctaatgtgggtggaccccatccagtctgttgaagg

SEQ ID NO: 9603 - DNA, 800 bp, Homo sapiens
ctgataacgttcacagccccatcctcagcacgtggattcgagtcaccgtgagaattccggtatctcaccctgtcctcaccttcagggctcccagggcccacactgtggtgggggacctgctggagcttcactgtgagtccctgagaggctctcccccgatcctgtaccgattttatcatgaggatgtcaccctggggaacagctcagccccctctggaggaggagcctccttcaacctctctctgactgcagaacattctggaaactactcctgtgatgcagacaatggcctgggggcccagcacagtcatggagtgagtctcagggtcacagttccggtgtctcgccccgtcctcaccctcagggctcccggggcccaggctgtggtgggggacccgctggagcttcactgtgagtccctgagaggctccttcccgatcctgtactggttttatcacgaggatgacaccttggggaacatctcggcccactctggaggaggggcatccttcaacctctctctgactacagaacattctggaaactactcatgtgaggctgacaatggcctgggggcccagcacagtaaagtggtgacactcaatgttacaggaacttccaggaacagaacaggccttaccrctgcgggaatcacggggctggtgstcarcatcytcgtccttgywgctgctgctgctctgctgcattacgccagggcccgaaggaaaccaggaggactttctgccactggaacatctagtcacagtcctagtgagtgtcaggagccttcctcgtccagg

SEQ ID NO: 9604 - DNA, 2474 bp, Homo sapiens
ctcaatcagctttatgcagagaagaagcttactgagctcactgctggtgctggtgtaggcaagtgctgctttggcaatctgggctgacctggcttgtctcctcagaactccttctccaatcctggagcaggcttccatgctgctgtgggcgtccttgctggcctttgctccagtctgtggacaatctgcagctgcacacaaacctgtgatttccgtccatcctccatggaccacattcttcaaaggagagagagtgactctgacttgcaatggatttcagttctatgcaacagagaaaacaacatggtatcatcggcactactggggagaaaagttgaccctgaccccaggaaacaccctcgaggttcgggaatctggactgtacagatgccaggcccggggctccccacgaagtaaccctgtgcgcttgctcttttcttcagactccttaatcctgcaggcaccatattctgtgtttgaaggtgacacattggttctgagatgccacagaagaaggaaagagaaattgactgctgtgaaatatacttggaatggaaacattctttccatttctaataaaagctgggatcttcttatcccacaagcaagttcaaataacaatggcaattatcgatgcattggatatggagacgagaatgatgtatttagatcaaatttcaaaataattaaaattcaagaactatttccacatccagagctgaaagctacagactctcagcctacagaggggaattctgtaaacctgagctgtgaaacacagcttcctccagagcggtcagacaccccacttcacttcaacttcttcagagatggcgaggtcatcctgtcagactggagcacgtacccggaactccagctcccaaccgtctggagagaaaactcaggatcctattggtgtggtgctgaaacagtgaggggtaacatccacaagcacagtccctcgctacagatccatgtgcagcggatccctgtgtctggggtgctcctggagacccagccctcagggggccaggctgttgaaggggagatgctggtccttgtctgctccgtggctgaaggcacaggggataccacattctcctggcaccgagaggacatgcaggagagtctggggaggaaaactcagcgttccctgagagcagagctggagctccctgccatcagacagagccatgcagggggatactactgtacagcagacaacagctacggccctgtccagagcatggtgctgaatgtcactgtgagagagaccccaggcaacagagatggccttgtcgccgcgggagccactggagggctgctcagtgctcttctcctggctgtggccctgctgtttcactgctggcgtcggaggaagtcaggagttggtttcttgggagacgaaaccaggctccctcccgctccaggcccaggagagtcctcccattccatctgccctgcccaggtggagcttcagtcgttgtatgttgatgtacaccccaaaaagggagatttggtatactctgagatccagactactcagctgggagaagaagaggaagctaatacctccaggacacttctagaggataaggatgtctcagttgtctactctgaggtaaagacacaacacccagataactcagctggaaagatcagctctaaggatgaagaaagttaagagaatgaaaagttacgagaacgtcctactcatgtgatttctcccttgtccaaagtcccaggcccagtgcagtccttgcggcccctggaatgatcaactcattccagctttctaattcttctcatgcatatgcattcactcccaggaatactcattcgtctactctgatgttgggatggaatggcctctgaaagacttcactaaaatgaccaggatccacagttaagagaagaccctgtagtatttgctgtgggcctgacctaatgtattccctagggtctgctttagagaagggggataaagagagagaaggactgttatgaaaaacagaagcacaaattttggtgaattgggatttgcagagatgaaaaagactgggtgacctggatctctgcttaatacatctacaaccattgtctcactggagactcacttgcatcagtttgtttaactgtgagtggctgcacaggcactgtgcaaacaatgaaaagccccttcacttctgcctgcacagcttacactgtcaggattcagttgcagattaaagaacccatctggaatggtttacagagagaggaatttaaaagaggacatcagaagagctggagatgcaagctctaggctgcgcttccaaaagcaaatgataattatgttaatgtcattagtgacaaagatttgcaacattagagaaaagagacacaaatataaaattaaaaacttaagtaccaactctccaaaactaaatttgaacttaaaatattagtataaactcataataaactctgccttt

SEQ ID NO: 9605 - DNA, 2797 bp, Homo sapiens
gtgcagtgtcctgactgtaagatcaagtccaaacctgttttggaattgaggaaacttctcttttgatctcagcccttggtggtccaggtcttcatgctgctgtgggtgatattactggtcctggctcctgtcagtggacagtttgcaaggacacccaggcccattattttcctccagcctccatggaccacagtcttccaaggagagagagtgaccctcacttgcaagggatttcgcttctactcaccacagaaaacaaaatggtaccatcggtaccttgggaaagaaatactaagagaaaccccagacaatatccttgaggttcaggaatctggagagtacagatgccaggcccagggctcccctctcagtagccctgtgcacttggatttttcttcagcttcgctgatcctgcaagctccactttctgtgtttgaaggagactctgtggttctgaggtgccgggcaaaggcggaagtaacactgaataatactatttacaagaatgataatgtcctggcattccttaataaaagaactgacttccatattcctcatgcatgtctcaaggacaatggtgcatatcgctgtactggatataaggaaagttgttgccctgtttcttccaatacagtcaaaatccaagtccaagagccatttacacgtccagtgctgagagccagctccttccagcccatcagcgggaacccagtgaccctgacctgtgagacccagctctctctagagaggtcagatgtcccgctccggttccgcttcttcagagatgaccagaccctgggattaggctggagtctctccccgaatttccagattactgccatgtggagtaaagattcagggttctactggtgtaaggcagcaacaatgcctcacagcgtcatatctgacagcccgagatcctggatacaggtgcagatccctgcatctcatcctgtcctcactctcagccctgaaaaggctctgaattttgagggaaccaaggtgacacttcactgtgaaacccaggaagattctctgcgcactttgtacaggttttatcatgagggtgtccccctgaggcacaagtcagtccgctgtgaaaggggagcatccatcagcttctcactgactacagagaattcagggaactactactgcacagctgacaatggccttggcgccaagcccagtaaggctgtgagcctctcagtcactgttcccgtgtctcatcctgtcctcaacctcagctctcctgaggacctgatttttgagggagccaaggtgacacttcactgtgaagcccagagaggttcactccccatcctgtaccagtttcatcatgaggatgctgccctggagcgtaggtcggccaactctgcaggaggagtggccatcagcttctctctgactgcagagcattcagggaactactactgcacagctgacaatggctttggcccccagcgcagtaaggcggtgagcctctccatcactgtccctgtgtctcatcctgtcctcaccctcagctctgctgaggccctgacttttgaaggagccactgtgacacttcactgtgaagtccagagaggttccccacaaatcctataccagttttatcatgaggacatgcccctgtggagcagctcaacaccctctgtgggaagagtgtccttcagcttctctctgactgaaggacattcagggaattactactgcacagctgacaatggctttggtccccagcgcagtgaagtggtgagcctttttgtcactgttccagtgtctcgccccatcctcaccctcagggttcccagggcccaggctgtggtgggggacctgctggagcttcactgtgaggccccgagaggctctcccccaatcctgtactggttttatcatgaggatgtcaccctggggagcagctcagccccctctggaggagaagcttctttcaacctctctctgactgcagaacattctggaaactactcatgtgaggccaacaatggcctagtggcccagcacagtgacacaatatcactcagtgttatagttccagtatctcgtcccatcctcaccttcagggctcccagggcccaggctgtggtgggggacctgctggagcttcactgtgaggccctgagaggctcctccccaatcctgtactggttttatcatgaagatgtcaccctgggtaagatctcagccccctctggaggaggggcctccttcaacctctctctgactacagaacattctggaatctactcctgtgaggcagacaatggtctggaggcccagcgcagtgagatggtgacactgaaagttgcaggtgagtgggccctgcccaccagcagcacatctgagaactgactgtgcctgttctccctgcagctgaaaatggagccacagagctcctcagggctgtttgcttgtgtggcatcccagcacacttcctgcctgcagaacctccctgtgaaagtctcggatcctttgtggtatggttccaggaatctgatgtttcccagcagtcttcttgaagatgatcaaagcacctcactaaaaatgcaaataagacttttttagaacataaactatattctgaactgaaattattacatgaaaatgaaaccaaagaattctgagcatatgtttctctgccgtagaaaggattaagctgtttcttgtccggattcttctctcattgacttctaagaagcctctactcttgagtctctttcattactggggatgtaaatgttccttacatttccacattaaaaatcctatgttaacg

SEQ ID NO: 9606 - DNA, 4422 bp, Homo sapiens
gtgcagtgtcctgactgtaagatcaagtccaaacctgttttggaattgaggaaacttctcttttgatctcagcccttggtggtccaggtcttcatgctgctgtgggtgatattactggtcctggctcctgtcagtggacagtttgcaaggacacccaggcccattattttcctccagcctccatggaccacagtcttccaaggagagagagtgaccctcacttgcaagggatttcgcttctactcaccacagaaaacaaaatggtaccatcggtaccttgggaaagaaatactaagagaaaccccagacaatatccttgaggttcaggaatctggagagtacagatgccaggcccagggctcccctctcagtagccctgtgcacttggatttttcttcagcttcgctgatcctgcaagctccactttctgtgtttgaaggagactctgtggttctgaggtgccgggcaaaggcggaagtaacactgaataatactatttacaagaatgataatgtcctggcattccttaataaaagaactgacttccatattcctcatgcatgtctcaaggacaatggtgcatatcgctgtactggatataaggaaagttgttgccctgtttcttccaatacagtcaaaatccaagtccaagagccatttacacgtccagtgctgagagccagctccttccagcccatcagcgggaacccagtgaccctgacctgtgagacccagctctctctagagaggtcagatgtcccgctccggttccgcttcttcagagatgaccagaccctgggattaggctggagtctctccccgaatttccagattactgccatgtggagtaaagattcagggttctactggtgtaaggcagcaacaatgcctcacagcgtcatatctgacagcccgagatcctggatacaggtgcagatccctgcatctcatcctgtcctcactctcagccctgaaaaggctctgaattttgagggaaccaaggtgacacttcactgtgaaacccaggaagattctctgcgcactttgtacaggttttatcatgagggtgtccccctgaggcacaagtcagtccgctgtgaaaggggagcatccatcagcttctcactgactacagagaattcagggaactactactgcacagctgacaatggccttggcgccaagcccagtaaggctgtgagcctctcagtcactgttcccgtgtctcatcctgtcctcaacctcagctctcctgaggacctgatttttgagggagccaaggtgacacttcactgtgaagcccagagaggttcactccccatcctgtaccagtttcatcatgaggatgctgccctggagcgtaggtcggccaactctgcaggaggagtggccatcagcttctctctgactgcagagcattcagggaactactactgcacagctgacaatggctttggcccccagcgcagtaaggcggtgagcctctccatcactgtccctgtgtctcatcctgtcctcaccctcagctctgctgaggccctgacttttgaaggagccactgtgacacttcactgtgaagtccagagaggttccccacaaatcctataccagttttatcatgaggacatgcccctgtggagcagctcaacaccctctgtgggaagagtgtccttcagcttctctctgactgaaggacattcagggaattactactgcacagctgacaatggctttggtccccagcgcagtgaagtggtgagcctttttgtcactggtaagtgctgggttcttgccagtcacccacccctggctgagttctctctcacccattcctttaaaaatctgtttgcactgtccagtttcctcccctaatcaacttaatccccttcttggcttcctcctcaactaactagctggggttttccgtactcataagtcctggctcagccagacccctaaaacagctcagtagattccccagcttttaccaaatgaatttatttattgtattttctcctcattccttgtatgttccaacagtacgccaatttttcttgatgcacggagcgtgtcctacttctctactgacatttacatattaacttagctacaagcacagtcttatagataaatattggtcaagaccttaaattctccaaaggatttccaatcttatggtagatttggagaaagctgctggtgaacaaagggggaaatggctccctaggaaccaactcctcaaacttctggagtttttatgatcccttgttttctaacctgctaaaatcagtatcattttattgtattattttaaaaaaactattgttgaagtatgacatacattcaagaaacgtgtgcaaattgtatgtgtacgatttggtgtctttttaggagctaagttgcttctgtttttacttgaatctttgtttatagaaactgggggaaagtttactttcttttcagagaagccaaatggtatgatagaaaaatcttgagcctgatgtgtcagacatgcccctagcataacttgttgagtaaagaggttatttttaaaatgtgaatgttctgagactactccaaagtcagagccaaatctactaggaagcttctagacttcactcattctgcatcccattactatctttttatccatgttttactttcttctcatattcagcagcatcttaagcctctttattttctgtttcttgactgtcacccttaatgccagtagaatgtaagcttcatgagaacagaactgcatccatcttggtcttcacaacatccctgtgcctactcagtgtttggcacacagtaggtcctcagtcaacatttgtaatttagtggacagatgatatgacaagatgataagaggggatttaaaaaaatcatctagcaaagcccaagaggaaaaaaaacaaagctattttagaaatgaaataccaatttgaagcagtaagaatagattggatatctttgaaaaccattaattgaatgaagaaccaatttgagaaaacaatacagaatgcaaagtagaaagatacagaaataaaggcaaaagttataatatggaaatcagacaatggatttgtctgtatccagttatgtggataattaaaatggagaccctcagaaaattgaaccgaagagtaaaatgaaactcaaaaatgtagtagaaattgttgggaagtaaagaaaacttgaatatgtagatcagaacatatatgttgatgacgttattgactttgaggttaaaaatatatatatgtgcctatgattatggggaaaaaagcagtcgtctcagaaagaaaaacatcaagttagtcttagactttgcagtgcactcagtaccaaagagagaggaggccagacttggacctgcgagggaagaataataaccgaaaattttatatcaattcaaaaagacattgtcaaaaatacagggattcaggaaactgagaatgcactaagccttctggaaaaaacacctaatgacaaaatctagcccaacaagatgtaaatgaatataaaggactcataatgaggaaaccgcattatgactggctctcaaccctggccgcatattagactcgtcaaagacctttgtaaaaggtcacacattgactcgtcaaagcccctctccagactaattcaattcagaatctcacagatggggccacagaatcagtattttttgacacaacctcaagtgagaatattgtgtagacaagattggaaaccactgatttagatatagaaacaaaggctaatcaactgtgagaattatggtcacagaatagaaagtaactattatgaacactgaaaatgtaaaaaaaatgtaacaaagaaaaatagttagaggaaggagaggaagtaaaggaacaatcattttctcatgattattattatttcagagtaaattgtgagttatttcacaattcaaaaagaatggactgttttaaaaaattagtaatagatttcaaaatgtccattttgtaaatcgtttctgaatactttgtcaacagttactcatcattaatggcttatacttcactaaaattccatggaaaaccaactagtagcctgtagagtcacataggagagaacaagtgaattctttgggtggcgcaagcatagatgttaggactgacaaaaaaaaataataaaaataaacctgtgcattgatatgatcacaaatgatcagggaaagaggaaacagaaactctcatacgccattattacaagtgtaaattggttcaaccttttcgtcttaattgacacattgtaattgtatatatttatggaagcacagtttgatattttgatatacatacatggtatataacgatcaaattaggatatttaatgtacccatcatctcatgcatttatcatttctttggaataaaaacattcaaaagcc

SEQ ID NO: 9607 - DNA, 5321 bp, Homo sapiens
gtgcagtgtcctgactgtaagatcaagtccaaacctgttttggaattgaggaaacttctcttttgatctcagcccttggtggtccaggtcttcatgctgctgtgggtgatattactggtcctggctcctgtcagtggacagtttgcaaggacacccaggcccattattttcctccagcctccatggaccacagtcttccaaggagagagagtgaccctcacttgcaagggatttcgcttctactcaccacagaaaacaaaatggtaccatcggtaccttgggaaagaaatactaagagaaaccccagacaatatccttgaggttcaggaatctggagagtacagatgccaggcccagggctcccctctcagtagccctgtgcacttggatttttcttcagcttcgctgatcctgcaagctccactttctgtgtttgaaggagactctgtggttctgaggtgccgggcaaaggcggaagtaacactgaataatactatttacaagaatgataatgtcctggcattccttaataaaagaactgacttccatattcctcatgcatgtctcaaggacaatggtgcatatcgctgtactggatataaggaaagttgttgccctgtttcttccaatacagtcaaaatccaagtccaagagccatttacacgtccagtgctgagagccagctccttccagcccatcagcgggaacccagtgaccctgacctgtgagacccagctctctctagagaggtcagatgtcccgctccggttccgcttcttcagagatgaccagaccctgggattaggctggagtctctccccgaatttccagattactgccatgtggagtaaagattcagggttctactggtgtaaggcagcaacaatgcctcacagcgtcatatctgacagcccgagatcctggatacaggtgcagatccctgcatctcatcctgtcctcactctcagccctgaaaaggctctgaattttgagggaaccaaggtgacacttcactgtgaaacccaggaagattctctgcgcactttgtacaggttttatcatgagggtgtccccctgaggcacaagtcagtccgctgtgaaaggggagcatccatcagcttctcactgactacagagaattcagggaactactactgcacagctgacaatggccttggcgccaagcccagtaaggctgtgagcctctcagtcactgttcccgtgtctcatcctgtcctcaacctcagctctcctgaggacctgatttttgagggagccaaggtgacacttcactgtgaagcccagagaggttcactccccatcctgtaccagtttcatcatgaggatgctgccctggagcgtaggtcggccaactctgcaggaggagtggccatcagcttctctctgactgcagagcattcagggaactactactgcacagctgacaatggctttggcccccagcgcagtaaggcggtgagcctctccatcactgtccctgtgtctcatcctgtcctcaccctcagctctgctgaggccctgacttttgaaggagccactgtgacacttcactgtgaagtccagagaggttccccacaaatcctataccagttttatcatgaggacatgcccctgtggagcagctcaacaccctctgtgggaagagtgtccttcagcttctctctgactgaaggacattcagggaattactactgcacagctgacaatggctttggtccccagcgcagtgaagtggtgagcctttttgtcactgttccagtgtctcgccccatcctcaccctcagggttcccagggcccaggctgtggtgggggacctgctggagcttcactgtgaggccccgagaggctctcccccaatcctgtactggttttatcatgaggatgtcaccctggggagcagctcagccccctctggaggagaagcttctttcaacctctctctgactgcagaacattctggaaactactcatgtgaggccaacaatggcctagtggcccagcacagtgacacaatatcactcagtgttatagttccagtatctcgtcccatcctcaccttcagggctcccagggcccaggctgtggtgggggacctgctggagcttcactgtgaggccctgagaggctcctccccaatcctgtactggttttatcatgaagatgtcaccctgggtaagatctcagccccctctggaggaggggcctccttcaacctctctctgactacagaacattctggaatctactcctgtgaggcagacaatggtctggaggcccagcgcagtgagatggtgacactgaaagttgcagttccggtgtctcgcccggtcctcaccctcagggctcccgggacccatgctgcggtgggggacctgctggagcttcactgtgaggccctgagaggctctcccctgatcctgtaccggttttttcatgaggatgtcaccctaggaaataggtcgtccccctctggaggagcgtccttaaacctctctctgactgcagagcactctggaaactactcctgtgaggccgacaatggcctcggggcccagcgcagtgagacagtgacactttatatcacagggctgaccgcgaacagaagtggcccttttgccacaggagtcgccgggggcctgctcagcatagcaggccttgctgcgggggcactgctgctctactgctggctctcgagaaaagcagggagaaagcctgcctctgaccccgccaggagcccttcagactcggactcccaagagcccacctatcacaatgtaccagcctgggaagagctgcaaccagtgtacactaatgcaaatcctagaggagaaaatgtggtttactcagaagtacggatcatccaagagaaaaagaaacatgcagtggcctctgaccccaggcatctcaggaacaagggttcccctatcatctactctgaagttaaggtggcgtcaaccccggtttccggatccctgttcttggcttcctcagctcctcacagatgagtccacacgtctctccaactgctgtttcagcctctgcaccccaaagttccccttgggggagaagcagcattgaagtgggaagatttaggctgccccagaccatatctactggcctttgtttcacatgtcctcattctcagtctgaccagaatgcagggccctgctggactgtcacctgtttcccagttaaagccctgactggcaggttttttaatccagtggcaaggtgctcccactccagggcccagcacatctcctggattccttagtgggcttcagctgtggttgctgttctgagtactgctctcatcacacccccacagagggggtcttaccacacaaagggagagtgggccttcaggagatgccgggctggcctaacagctcaggtgctcctaaactccgacacagagttcctgctttgggtggatgcatttctcaattgtcatcagcctggtggggctactgcagtgtgctgccaaatgggacagcacacagcctgtgcacatgggacatgtgatgggtctccccacgggggctgcatttcacactcctccacctgtctcaaactctaaggtcggcacttgacaccaaggtaacttctctcctgctcatgtgtcagtgtctacctgcccaagtaagtggctttcatacaccaagtcccgaagttcttcccatcctaacagaagtaacccagcaagtcaaggccaggaggaccaggggtgcagacagaacacatactggaacacaggaggtgctcaattactatttgactgactgactgaatgaatgaatgaatgaggaagaaaactgtgggtaatcaaactggcataaaatccagtgcactccctaggaaatccgggaggtattctggcttcctaagaaacaacggaagagaaggagcttggatgaagaaactgttcagcaagaagaagggcttcttcacacttttatgtgcttgtggatcacctgaggatctgtgaaaatacagatactgattcagtgggtctgtgtagagcctgagactgccattctaacatgttcccaggggatgctgatgctgctggccctgggactgcactgcatgcatgtgaagccctataggtctcagcagaggcccatggagagggaatgtgtggctctggctgcccagggcccaactcggttcacacggatcgtgctgctccctggccagcctttggccacagcaccaccagctgctgttgctgagagagcttcttctctgtgacatgttggctttcatcagccaccctgggaagcggaaagtagctgccactatctttgtttccccacctcaggcctcacactttcccatgaaaagggtgaatgtatataacctgagccctctccattcagagttgttctcccatctctgagcaatgggatgttctgttccgcttttatgatatccatcacatcttatcttgatctttgctcccagtggattgtacagtgatgacttttaagccccacggccctgaaataaaatccttccaagggcattggaagctcactccacctgaaccatggcttttcatgcttccaagtgtcagggccttgcccagatagacagggctgactctgctgccccaacctttcaaggaggaaaccagacacctgagacaggagcctgtatgcagcccagtgcagccttgcagaggacaaggctggaggcatttgtcatcactacagatatgcaactaaaatagacgtggagcaagagaaatgcattcccaccgaggccgcttttttaggcctagttgaaagtcaagaaggacagcagcaagcataggctcaggattaaagaaaaaaatctgctcacagtctgttctggaggtcacatcaccaacaaagctcacgccctatgcagttctgagaaggtggaggcaccaggctcaaaagaggaaatttagaatttctcattgggagagtaaggtacccccatcccagaatgataactgcacagtggcagaacaaactccaccctaatgtgggtggaccccatccagtctgttgaaggcctgaatgtaacaaaagggcttattcttcctcaagtaagggggaactcctgctttgggctgggacataagtttttctgctttcagacgcaaactgaaaaatggctcttcttgggtcttgagcttgctggcatatggactgaaagaaactatgctattggatctcctggatctccagcttgctgactgcagatcttgagatatgtcagcctctacagtcacaagagctaattcattctaataaaccaatctttc

SEQ ID NO: 9608 - DNA, 2970 bp, Homo sapiens
agtgaaggggtttcccatatgaaaaatacagaaagaattatttgaatactagcaaatacacaacttgatatttctagagaacccaggcacagtcttggagacattactcctgagagactgcagctgatggaagatgagccccaacttctaaaaatgtatcactaccgggattgagatacaaacagcatttaggaaggtctcatctgagtagcagcttcctgccctccttcttggagataagtcgggcttttggtgagacagactttcccaaccctctgcccggccggtgcccatgcttctgtggctgctgctgctgatcctgactcctggaagagaacaatcaggggtggccccaaaagctgtacttctcctcaatcctccatggtccacagccttcaaaggagaaaaagtggctctcatatgcagcagcatatcacattccctagcccagggagacacatattggtatcacgatgagaagttgttgaaaataaaacatgacaagatccaaattacagagcctggaaattaccaatgtaagacccgaggatcctccctcagtgatgccgtgcatgtggaattttcacctgactggctgatcctgcaggctttacatcctgtctttgaaggagacaatgtcattctgagatgtcaggggaaagacaacaaaaacactcatcaaaaggtttactacaaggatggaaaacagcttcctaatagttataatttagagaagatcacagtgaattcagtctccagggataatagcaaatatcattgtactgcttataggaagttttacatacttgacattgaagtaacttcaaaacccctaaatatccaagttcaagagctgtttctacatcctgtgctgagagccagctcttccacgcccatagaggggagtcccatgaccctgacctgtgagacccagctctctccacagaggccagatgtccagctgcaattctccctcttcagagatagccagaccctcggattgggctggagcaggtcccccagactccagatccctgccatgtggactgaagactcagggtcttactggtgtgaggtggagacagtgactcacagcatcaaaaaaaggagcctgagatctcagatacgtgtacagagagtccctgtgtctaatgtgaatctagagatccggcccaccggagggcagctgattgaaggagaaaatatggtccttatttgctcagtagcccagggttcagggactgtcacattctcctggcacaaagaaggaagagtaagaagcctgggtagaaagacccagcgttccctgttggcagagctgcatgttctcaccgtgaaggagagtgatgcagggagatactactgtgcagctgataacgttcacagccccatcctcagcacgtggattcgagtcaccgtgagaattccggtatctcaccctgtcctcaccttcagggctcccagggcccacactgtggtgggggacctgctggagcttcactgtgagtccctgagaggctctcccccgatcctgtaccgattttatcatgaggatgtcaccctggggaacagctcagccccctctggaggaggagcctccttcaacctctctctgactgcagaacattctggaaactactcctgtgatgcagacaatggcctgggggcccagcacagtcatggagtgagtctcagggtcacagttccggtgtctcgccccgtcctcaccctcagggctcccggggcccaggctgtggtgggggacctgctggagcttcactgtgagtccctgagaggctccttcccgatcctgtactggttttatcacgaggatgacaccttggggaacatctcggcccactctggaggaggggcatccttcaacctctctctgactacagaacattctggaaactactcatgtgaggctgacaatggcctgggggcccagcacagtaaagtggtgacactcaatgttacaggaacttccaggaacagaacaggccttaccgctgcgggaatcacggggctggtgctcagcatcctcgtccttgctgctgctgctgctctgctgcattacgccagggcccgaaggaaaccaggaggactttctgccactggaacatctagtcacagtcctagtgagtgtcaggagccttcctcgtccaggccttccaggatagaccctcaagagcccactcactctaaaccactagccccaatggagctggagccaatgtacagcaatgtaaatcctggagatagcaacccgatttattcccagatctggagcatccagcatacaaaagaaaactcagctaattgtccaatgatgcatcaagagcatgaggaacttacagtcctctattcagaactgaagaagacacacccagacgactctgcaggggaggctagcagcagaggcagggcccatgaagaagatgatgaagaaaactatgagaatgtaccacgtgtattactggcctcagaccactagccccttacccagagtggcccacaggaaacagcctgcaccatttttttttctgttctctccaaccacacatcatccatctctccagactctgcctcctacgaggctgggctgcagggtatgtgaggctgagcaaaaggtctgcaaatctcccctgtgcctgatctgtgtgttccccaggaagagagcaggcagcctctgagcaagcactgtgttattttcacagtggagacacgtggcaaggcaggagggccctcagctcctagggctgtcgaatagaggaggagagagaaatggtctagccagggttacaagggcacaatcatgaccatttgatccaagtgtgatcgaaagctgttaatgtgctctctgtataaacaatttgctccaaatattttgtttcccttttttgtgtggctggtagtggcattgctgatgttttggtgtatatgctgtatccttgctaccatattggg

SEQ ID NO: 9609 - DNA, 2580 bp, Homo sapiens
tggtgaccaagagtacatctcttttcaaatagctggattaggtcctcatgctgctgtggtcattgctggtcatctttgatgcagtcactgaacaggcagattcgctgacccttgtggcgccctcttctgtcttcgaaggagacagcatcgttctgaaatgccagggagaacagaactggaaaattcagaagatggcttaccataaggataacaaagagttatctgttttcaaaaaattctcagatttccttatccaaagtgcagttttaagtgacagtggtaactatttctgtagtaccaaaggacaactctttctctgggataaaacttcaaatatagtaaagataaaagtccaagagctctttcaacgtcctgtgctgactgccagctccttccagcccatcgaagggggtccagtgagcctgaaatgtgagacccggctctctccacagaggttggatgttcaactccagttctgcttcttcagagaaaaccaggtcctggggtcaggctggagcagctctccggagctccagatttctgccgtgtggagtgaagacacagggtcttactggtgcaaggcagaaacggtgactcacaggatcagaaaacagagcctccaatcccagattcacgtgcagagaatccccatctctaatgtaagcttggagatccgggcccccgggggacaggtgactgaaggacaaaaactgatcctgctctgctcagtggctgggggtacaggaaatgtcacattctcctggtacagagaggccacaggaaccagtatgggaaagaaaacccagcgttccctgtcagcagagctggagatcccagctgtgaaagagagtgatgccggcaaatattactgtagagctgacaacggccatgtgcctatccagagcaaggtggtgaatatccctgtgagaattccagtgtctcgccctgtcctcaccctcaggtctcctggggcccaggctgcagtgggggacctgctggagcttcactgtgaggccctgagaggctctcccccaatcttgtaccaattttatcatgaggatgtcacccttgggaacagctcggccccctctggaggaggggcctccttcaacctctctttgactgcagaacattctggaaactactcctgtgaggccaacaacggcctgggggcccagtgcagtgaggcagtgccagtctccatctcaggacctgatggctatagaagagacctcatgacagctggagttctctggggactgtttggtgtccttggtttcactggtgttgctttgctgttgtatgccttgttccacaagatatcaggagaaagttctgccactaatgaacccagaggggcttccaggccaaatcctcaagagttcacctattcaagcccaaccccagacatggaggagctgcagccagtgtatgtcaatgtgggctctgtagatgtggatgtggtttattctcaggtctggagcatgcagcagccagaaagctcagcaaacatcaggacacttctggagaacaaggactcccaagtcatctactcttctgtgaagaaatcataacacttggaggaatcagaagggaagatcaacagcaaggatggggcatcattaagacttgctataaaaccttatgaaaatgcttgaggcttatcacctgccacagccagaacgtgcctcaggaggcacctcctgtcatttttgtcctgatgatgtttcttctccaatatcttcttttacctatcaatattcattgaactgctgctacatccagacactgtgcaaataaattatttctgctaccttctcttaagcaatcagtgtgtaaagatttgagggaagaatgaataagagatacaaggtctcaccttcatctactgtgaagtgatgagaacaggacttgatagtggtgtattaacttatttatgtgctgctggatacagtttgctaatattttgttgagaatttttgcaaatatgttcattgggaatattggcctgaaattttcttttccactgtgtctctgccagaatgtttgtatcaggctgatgctggcttcatagaatgagttaggcaggagcccttcctccttgattttttggcatagtttcagcaggattggtaccagttattctttctgcatcttgtagaattcagctatgaatccatctggtctagggcttttgtgttggttggtaagttttttattactaattcaacttcagcgcttgatattggtctaggaggggtttctgtctcttcctggttcaatcttgggagattgtgtgtttccaggaatttagccgtttcctccagattttcttctttatgtgcatcgacttgagtgtaaacataacttatatgcactgggaaaccaaaaaatctgtgtgacttgctttattgcagcatttgttttattttggtagtctggaactgaacctgcaatatcaccaaagtatgcatatagttgcaaaaatgtgatttttgacatagtaaatatgagtatttgcaataaactatgatattacttttgtaagtatatagaataaaatgtaaataatctataaaa

SEQ ID NO: 9610 - DNA, 2303 bp, Homo sapiens
gaggcatctctaggtaccatccctgacctggtcctcatgctgccgaggctgttgctgttgatctgtgctccactctgtgaacctgccgagctgtttttgatagccagcccctcccatcccacagaggggagcccagtgaccctgacgtgtaagatgccctttctacagagttcagatgcccagttccagttctgctttttcagagacacccgggccttgggcccaggctggagcagctcccccaagctccagatcgctgccatgtggaaagaagacacagggtcatactggtgcgaggcacagacaatggcgtccaaagtcttgaggagcaggagatcccagataaatgtgcacagggtccctgtcgctgatgtgagcttggagactcagcccccaggaggacaggtgatggagggagacaggctggtcctcatctgctcagttgctatgggcacaggagacatcaccttcctttggtacaaaggggctgtaggtttaaaccttcagtcaaagacccagcgttcactgacagcagagtatgagattccttcagtgagggagagtgatgctgagcaatattactgtgtagctgaaaatggctatggtcccagccccagtgggctggtgagcatcactgtcagaatcccggtgtctcgcccaatcctcatgctcagggctcccagggcccaggctgcagtggaggatgtgctggagcttcactgtgaggccctgagaggctctcctccaatcctgtactggttttatcacgaggatatcaccctggggagcaggtcggccccctctggaggaggagcctccttcaacctttccctgactgaagaacattctggaaactactcctgtgaggccaacaatggcctgggggcccagcgcagtgaggcggtgacactcaacttcacagtgcctactggggccagaagcaatcatcttacctcaggagtcattgaggggctgctcagcacccttggtccagccaccgtggccttattattttgctacggcctcaaaagaaaaataggaagacgttcagccagggatccactcaggagccttcccagccctctaccccaagagttcacctacctcaactcacctaccccagggcagctacagcctatatatgaaaatgtgaatgttgtaagtggggatgaggtttattcactggcgtactataaccagccggagcaggaatcagtagcagcagaaaccctggggacacatatggaggacaaggtttccttagacatctattccaggctgaggaaagcaaacattacagatgtggactatgaagatgctatgtaaggttatggaagattctgctctttgaaaaccatccatgaccccaagcctcaggcctgatatgttcttcagagatcctggggcattagctttccagtatacctcttctggatgccattctccatggcactattccttcatctactgtgaagtgaagttggcgcagccctgaagaaactacctaggagaactaatagacacaggagtgacagggactttgttatcagaaccagattcctgccggctcctttgaaaacaggtcatattgtgctcttctgtttacaagaggaaacaagatggaataaaagaaattgggatcttgggttggagggacagtgaagcttagagcacatgaactcaaggttagtgactctgcaggacttcacagagagagctgtgcccatcattcagtccaagtgctttctctgcccagacagcacagaactccagccccgctacttacatggatcatcgagtttccacctaaaatatgattctatttattttgagtcactgttaccaaattagaactaaaacaaagttacataaaaagttattgtgactccacttaattttagtgacgtatttttgtatatataggccaacctataccacatccaaaattatgtatctattacagcccctagaagctttataaatacagtgtgtcttcttttattcacaaaatttttgaaatcgtggtaatatggtttgaaacctgtatcttaattattttttttttaaattgagacagggtctcactctgtcactcaatctggaatgcagtggcacaatcttgcctcactgcaacgcctgcctctcaggctcaagcaaacctctcacctcagcctgctgagtagctgggactacaggcacatgccaccaaacttggccattttttgtcttacgtagagacaagatttcaccgttttgcccaggctggtctcaaactcctgggctcaagcaatgtattgaatttt

SEQ ID NO: 9611 - protein, 261 aa, Homo sapiens
MGKKTQRSLSAELEIPAVKESDAGKYYCRADNGHVPIQSKVVNIPVRIPVSRPVLTLRSPGAQAAVGDLLELHCEALRGSPPILYQFYHEDVTLGNSSAPSGGGASFNLSLTAEHSGNYSCEANNGLGAQCSEAVPVSISGPDGYRRDLMTAGVLWGLFGVLGFTGVALLLYALFHKISGESSATNEPRGASRPNPQEFTYSSPTPDMEELQPVYVNVGSVDVDVVYSQVWSMQQPESSANIRTLLENKDSQVIYSSVKKS

SEQ ID NO: 9612 - protein, 255 aa, Homo sapiens
MWEWKICNSHGARPFAEPAGWEFVNLLRHHKSFLIAPLCLSVPVSRPVLTLRSPGAQAAVGDLLELHCEALRGSPPILYQFYHEDVTLGNSSAPSGGGASFNLSLTAEHSGNYSCEANNGLGAQCSEAVPVSISGPDGYRRDLMTAGVLWGLFGVLGFTGVALLLYALFHKISGESSATNEPRGASRPNPQEFTYSSPTPDMEELQPVYVNVGSVDVDVVYSQVWSMQQPESSANIRTLLENKDSQVIYSSVKKS

SEQ ID NO: 9613 - protein, 34 aa, Homo sapiens
MGKKTQRSLSAELEIPAVKESDAGKYYCRADGCG

SEQ ID NO: 9614 - protein, 34 aa, Homo sapiens
NGHVPIQSKVVNIPVRIPVSRPVLTLRSPGAGCG

SEQ ID NO: 9615 - protein, 34 aa, Homo sapiens
QAAVGDLLELHCEALRGSPPILYQFYHEDVTGCG

SEQ ID NO: 9616 - protein, 34 aa, Homo sapiens
LGNSSAPSGGGASFNLSLTAEHSGNYSCEANGCG

SEQ ID NO: 9617 - protein, 35 aa, Homo sapiens
NGLGAQCSEAVPVSISGPDGYRRDLMTAGVLWGCG

SEQ ID NO: 9618 - protein, 9 aa, Homo sapiens
GVLWGLFGV

SEQ ID NO: 9619 - protein, 9 aa, Homo sapiens
LLYALFHKI

SEQ ID NO: 9620 - protein, 9 aa, Homo sapiens
GLFGVLGFT

SEQ ID NO: 9621 - protein, 9 aa, Homo sapiens
VVYSQVWSM

SEQ ID NO: 9622 - protein, 9 aa, Homo sapiens
VLGFTGVAL

SEQ ID NO: 9623 - protein, 9 aa, Homo sapiens
VLWGLFGVL

SEQ ID NO: 9624 - protein, 9 aa, Homo sapiens
YVNVGSVDV

SEQ ID NO: 9625 - protein, 9 aa, Homo sapiens
MTAGVLWGL

SEQ ID NO: 9626 - protein, 9 aa, Homo sapiens
VLTLRSPGA

SEQ ID NO: 9627 - protein, 9 aa, Homo sapiens
ELQPVYVNV

SEQ ID NO: 9628 - protein, 9 aa, Homo sapiens
LLENKDSQV

SEQ ID NO: 9629 - protein, 9 aa, Homo sapiens
AQCSEAVPV

SEQ ID NO: 9630 - protein, 9 aa, Homo sapiens
NVGSVDVDV

SEQ ID NO: 9631 - protein, 9 aa, Homo sapiens
DLLELHCEA

SEQ ID NO: 9632 - protein, 9 aa, Homo sapiens
GLGAQCSEA

SEQ ID NO: 9633 - protein, 9 aa, Homo sapiens
QQPESSANI

SEQ ID NO: 9634 - protein, 9 aa, Homo sapiens
GVALLLYAL

SEQ ID NO: 9635 - protein, 9 aa, Homo sapiens
FGVLGFTGV

SEQ ID NO: 9636 - protein, 9 aa, Homo sapiens
SMQQPESSA

SEQ ID NO: 9637 - protein, 9 aa, Homo sapiens
KISGESSAT

SEQ ID NO: 9638 - protein, 9 aa, Homo sapiens
VLWGLFGVL

SEQ ID NO: 9639 - protein, 9 aa, Homo sapiens
GVLWGLFGV

SEQ ID NO: 9640 - protein, 9 aa, Homo sapiens
GVALLLYAL

SEQ ID NO: 9641 - protein, 9 aa, Homo sapiens
VVYSQVWSM

SEQ ID NO: 9642 - protein, 9 aa, Homo sapiens
YVNVGSVDV

SEQ ID NO: 9643 - protein, 9 aa, Homo sapiens
VLGFTGVAL

SEQ ID NO: 9644 - protein, 9 aa, Homo sapiens
LLYALFHKI

SEQ ID NO: 9645 - protein, 9 aa, Homo sapiens
RIPVSRPVL

SEQ ID NO: 9646 - protein, 9 aa, Homo sapiens
GLFGVLGFT

SEQ ID NO: 9647 - protein, 9 aa, Homo sapiens
KVVNIPVRI

SEQ ID NO: 9648 - protein, 9 aa, Homo sapiens
GVLGFTGVA

SEQ ID NO: 9649 - protein, 9 aa, Homo sapiens
NVGSVDVDV

SEQ ID NO: 9650 - protein, 9 aa, Homo sapiens
HVPIQSKVV

SEQ ID NO: 9651 - protein, 9 aa, Homo sapiens
YQFYHEDVT

SEQ ID NO: 9652 - protein, 9 aa, Homo sapiens
LGFTGVALL

SEQ ID NO: 9653 - protein, 9 aa, Homo sapiens
YSCEANNGL

SEQ ID NO: 9654 - protein, 9 aa, Homo sapiens
KISGESSAT

SEQ ID NO: 9655 - protein, 9 aa, Homo sapiens
MTAGVLWGL

SEQ ID NO: 9656 - protein, 9 aa, Homo sapiens
PVSRPVLTL

SEQ ID NO: 9657 - protein, 9 aa, Homo sapiens
AQAAVGDLL

SEQ ID NO: 9658 - protein, 9 aa, Homo sapiens
GFTGVALLL

SEQ ID NO: 9659 - protein, 9 aa, Homo sapiens
TYSSPTPDM

SEQ ID NO: 9660 - protein, 9 aa, Homo sapiens
QFYHEDVTL

SEQ ID NO: 9661 - protein, 9 aa, Homo sapiens
RIPVSRPVL

SEQ ID NO: 9662 - protein, 9 aa, Homo sapiens
LYQFYHEDV

SEQ ID NO: 9663 - protein, 9 aa, Homo sapiens
AAVGDLLEL

SEQ ID NO: 9664 - protein, 9 aa, Homo sapiens
LLELHCEAL

SEQ ID NO: 9665 - protein, 9 aa, Homo sapiens
GAQAAVGDL

SEQ ID NO: 9666 - protein, 9 aa, Homo sapiens
YSCEANNGL

SEQ ID NO: 9667 - protein, 9 aa, Homo sapiens
VLWGLFGVL

SEQ ID NO: 9668 - protein, 9 aa, Homo sapiens
MTAGVLWGL

SEQ ID NO: 9669 - protein, 9 aa, Homo sapiens
AQAAVGDLL

SEQ ID NO: 9670 - protein, 9 aa, Homo sapiens
SSANIRTLL

SEQ ID NO: 9671 - protein, 9 aa, Homo sapiens
TQRSLSAEL

SEQ ID NO: 9672 - protein, 9 aa, Homo sapiens
SPTPDMEEL

SEQ ID NO: 9673 - protein, 9 aa, Homo sapiens
GSPPILYQF

SEQ ID NO: 9674 - protein, 9 aa, Homo sapiens
LYALFHKIS

SEQ ID NO: 9675 - protein, 9 aa, Homo sapiens
GYRRDLMTA

SEQ ID NO: 9676 - protein, 9 aa, Homo sapiens
GVALLLYAL

SEQ ID NO: 9677 - protein, 9 aa, Homo sapiens
KVVNIPVRI

SEQ ID NO: 9678 - protein, 9 aa, Homo sapiens
LLLYALFHK

SEQ ID NO: 9679 - protein, 9 aa, Homo sapiens
LLYALFHKI

SEQ ID NO: 9680 - protein, 9 aa, Homo sapiens
VLWGLFGVL

SEQ ID NO: 9681 - protein, 9 aa, Homo sapiens
NIRTLLENK

SEQ ID NO: 9682 - protein, 9 aa, Homo sapiens
QVIYSSVKK

SEQ ID NO: 9683 - protein, 9 aa, Homo sapiens
AVKESDAGK

SEQ ID NO: 9684 - protein, 9 aa, Homo sapiens
SQVIYSSVK

SEQ ID NO: 9685 - protein, 9 aa, Homo sapiens
DMEELQPVY

SEQ ID NO: 9686 - protein, 9 aa, Homo sapiens
ALLLYALFH

SEQ ID NO: 9687 - protein, 9 aa, Homo sapiens
GLFGVLGFT

SEQ ID NO: 9688 - protein, 9 aa, Homo sapiens
ALRGSPPIL

SEQ ID NO: 9689 - protein, 9 aa, Homo sapiens
VVYSQVWSM

SEQ ID NO: 9690 - protein, 9 aa, Homo sapiens
GVALLLYAL

SEQ ID NO: 9691 - protein, 9 aa, Homo sapiens
FTGVALLLY

SEQ ID NO: 9692 - protein, 9 aa, Homo sapiens
GLGAQCSEA

SEQ ID NO: 9693 - protein, 9 aa, Homo sapiens
VLGFTGVAI

SEQ ID NO: 9694 - protein, 9 aa, Homo sapiens
LLELHCEAL

SEQ ID NO: 9695 - protein, 9 aa, Homo sapiens
KVVNIPVRI

SEQ ID NO: 9696 - protein, 9 aa, Homo sapiens
GVLWGLFGV

SEQ ID NO: 9697 - protein, 9 aa, Homo sapiens
MTAGVLWGL

SEQ ID NO: 9698 - protein, 9 aa, Homo sapiens
QVIYSSVKK

SEQ ID NO: 9699 - protein, 9 aa, Homo sapiens
AVKESDAGK

SEQ ID NO: 9700 - protein, 9 aa, Homo sapiens
ISGPDGYRR

SEQ ID NO: 9701 - protein, 9 aa, Homo sapiens
ESSATNEPR

SEQ ID NO: 9702 - protein, 9 aa, Homo sapiens
VSRPVLTLR

SEQ ID NO: 9703 - protein, 9 aa, Homo sapiens
DVTLGNSSA

SEQ ID NO: 9704 - protein, 9 aa, Homo sapiens
NVGSVDVDV

SEQ ID NO: 9705 - protein, 9 aa, Homo sapiens
DVDVVYSQV

SEQ ID NO: 9706 - protein, 9 aa, Homo sapiens
IPVRIPVSR

SEQ ID NO: 9707 - protein, 9 aa, Homo sapiens
LLLYALFHK

SEQ ID NO: 9708 - protein, 9 aa, Homo sapiens
GVLWGLFGV

SEQ ID NO: 9709 - protein, 9 aa, Homo sapiens
GVALLLYAL

SEQ ID NO: 9710 - protein, 9 aa, Homo sapiens
KVVNIPVRI

SEQ ID NO: 9711 - protein, 9 aa, Homo sapiens
AVGDLLELH

SEQ ID NO: 9712 - protein, 9 aa, Homo sapiens
GVLGFTGVA

SEQ ID NO: 9713 - protein, 9 aa, Homo sapiens
SISGPDGYR

SEQ ID NO: 9714 - protein, 9 aa, Homo sapiens
SQVIYSSVK

SEQ ID NO: 9715 - protein, 9 aa, Homo sapiens
QPESSANIR

SEQ ID NO: 9716 - protein, 9 aa, Homo sapiens
LELHCEALR

SEQ ID NO: 9717 - protein, 9 aa, Homo sapiens
HVPIQSKVV

SEQ ID NO: 9718 - protein, 9 aa, Homo sapiens
QVIYSSVKK

SEQ ID NO: 9719 - protein, 9 aa, Homo sapiens
AVKESDAGK

SEQ ID NO: 9720 - protein, 9 aa, Homo sapiens
LLLYALFHK

SEQ ID NO: 9721 - protein, 9 aa, Homo sapiens
SQVIYSSVK

SEQ ID NO: 9722 - protein, 9 aa, Homo sapiens
NIRTLLENK

SEQ ID NO: 9723 - protein, 9 aa, Homo sapiens
GVLWGLFGV

SEQ ID NO: 9724 - protein, 9 aa, Homo sapiens
GVALLLYAL

SEQ ID NO: 9725 - protein, 9 aa, Homo sapiens
KVVNIPVRI

SEQ ID NO: 9726 - protein, 9 aa, Homo sapiens
GVLGFTGVA

SEQ ID NO: 9727 - protein, 9 aa, Homo sapiens
AELEIPAVK

SEQ ID NO: 9728 - protein, 9 aa, Homo sapiens
SISGPDGYR

SEQ ID NO: 9729 - protein, 9 aa, Homo sapiens
VVYSQVWSM

SEQ ID NO: 9730 - protein, 9 aa, Homo sapiens
IPVRIPVSR

SEQ ID NO: 9731 - protein, 9 aa, Homo sapiens
QPESSANIR

SEQ ID NO: 9732 - protein, 9 aa, Homo sapiens
GYRRDLMTA

SEQ ID NO: 9733 - protein, 9 aa, Homo sapiens
NVGSVDVDV

SEQ ID NO: 9734 - protein, 9 aa, Homo sapiens
MTAGVLWGL

SEQ ID NO: 9735 - protein, 9 aa, Homo sapiens
YVNVGSVDV

SEQ ID NO: 9736 - protein, 9 aa, Homo sapiens
FTGVALLLY

SEQ ID NO: 9737 - protein, 9 aa, Homo sapiens
NGHVPIQSK

SEQ ID NO: 9738 - protein, 9 aa, Homo sapiens
LLLYALFHK

SEQ ID NO: 9739 - protein, 9 aa, Homo sapiens
SISGPDGYR

SEQ ID NO: 9740 - protein, 9 aa, Homo sapiens
VVYSQVWSM

SEQ ID NO: 9741 - protein, 9 aa, Homo sapiens
QVIYSSVKK

SEQ ID NO: 9742 - protein, 9 aa, Homo sapiens
SQVIYSSVK

SEQ ID NO: 9743 - protein, 9 aa, Homo sapiens
NIRTLLENK

SEQ ID NO: 9744 - protein, 9 aa, Homo sapiens
IPVRIPVSR

SEQ ID NO: 9745 - protein, 9 aa, Homo sapiens
GVLWGLFGV

SEQ ID NO: 9746 - protein, 9 aa, Homo sapiens
GVALLLYAL

SEQ ID NO: 9747 - protein, 9 aa, Homo sapiens
AVKESDAGK

SEQ ID NO: 9748 - protein, 9 aa, Homo sapiens
QPESSANIR

SEQ ID NO: 9749 - protein, 9 aa, Homo sapiens
LLYALFHKI

SEQ ID NO: 9750 - protein, 9 aa, Homo sapiens
KVVNIPVRI

SEQ ID NO: 9751 - protein, 9 aa, Homo sapiens
VLWGLFGVL

SEQ ID NO: 9752 - protein, 9 aa, Homo sapiens
ISGPDGYRR

SEQ ID NO: 9753 - protein, 9 aa, Homo sapiens
SDAGKYYCR

SEQ ID NO: 9754 - protein, 9 aa, Homo sapiens
MTAGVLWGL

SEQ ID NO: 9755 - protein, 9 aa, Homo sapiens
ALLLYALFH

SEQ ID NO: 9756 - protein, 9 aa, Homo sapiens
SKVVNIPVR

SEQ ID NO: 9757 - protein, 9 aa, Homo sapiens
RIPVSRPVL

SEQ ID NO: 9758 - protein, 9 aa, Homo sapiens
ESSATNEPR

SEQ ID NO: 9759 - protein, 9 aa, Homo sapiens
SISGPDGYR

SEQ ID NO: 9760 - protein, 9 aa, Homo sapiens
VSRPVLTLR

SEQ ID NO: 9761 - protein, 9 aa, Homo sapiens
ISGPDGYRR

SEQ ID NO: 9762 - protein, 9 aa, Homo sapiens
QPESSANIR

SEQ ID NO: 9763 - protein, 9 aa, Homo sapiens
TNEPRGASR

SEQ ID NO: 9764 - protein, 9 aa, Homo sapiens
IPVRIPVSR

SEQ ID NO: 9765 - protein, 9 aa, Homo sapiens
DVTLGNSSA

SEQ ID NO: 9766 - protein, 9 aa, Homo sapiens
DSQVIYSSV

SEQ ID NO: 9767 - protein, 9 aa, Homo sapiens
ESSANIRTL

SEQ ID NO: 9768 - protein, 9 aa, Homo sapiens
DVDVVYSQV

SEQ ID NO: 9769 - protein, 9 aa, Homo sapiens
DVVYSQVWS

SEQ ID NO: 9770 - protein, 9 aa, Homo sapiens
ESDAGKYYC

SEQ ID NO: 9771 - protein, 9 aa, Homo sapiens
ELQPVYVNV

SEQ ID NO: 9772 - protein, 9 aa, Homo sapiens
DLLELHCEA

SEQ ID NO: 9773 - protein, 9 aa, Homo sapiens
NVGSVDVDV

SEQ ID NO: 9774 - protein, 9 aa, Homo sapiens
SVDVDVVYS

SEQ ID NO: 9775 - protein, 9 aa, Homo sapiens
LYQFYHEDV

SEQ ID NO: 9776 - protein, 9 aa, Homo sapiens
TYSSPTPDM

SEQ ID NO: 9777 - protein, 9 aa, Homo sapiens
NIPVRIPVS

SEQ ID NO: 9778 - protein, 9 aa, Homo sapiens
VRIPVSRPV

SEQ ID NO: 9779 - protein, 9 aa, Homo sapiens
RIPVSRPVL

SEQ ID NO: 9780 - protein, 9 aa, Homo sapiens
LGFTGVALL

SEQ ID NO: 9781 - protein, 9 aa, Homo sapiens
AAVGDLLEL

SEQ ID NO: 9782 - protein, 9 aa, Homo sapiens
ESSANIRTL

SEQ ID NO: 9783 - protein, 9 aa, Homo sapiens
SSANIRTLL

SEQ ID NO: 9784 - protein, 9 aa, Homo sapiens
DGYRRDLMT

SEQ ID NO: 9785 - protein, 9 aa, Homo sapiens
RRDLMTAGV

SEQ ID NO: 9786 - protein, 9 aa, Homo sapiens
NIPVRIPVS

SEQ ID NO: 9787 - protein, 9 aa, Homo sapiens
EALRGSPPI

SEQ ID NO: 9788 - protein, 9 aa, Homo sapiens
GVLWGLFGV

SEQ ID NO: 9789 - protein, 9 aa, Homo sapiens
GVALLLYAL

SEQ ID NO: 9790 - protein, 9 aa, Homo sapiens
VNIPVRIPV

SEQ ID NO: 9791 - protein, 9 aa, Homo sapiens
MTAGVLWGL

SEQ ID NO: 9792 - protein, 9 aa, Homo sapiens
VLWGLFGVL

SEQ ID NO: 9793 - protein, 9 aa, Homo sapiens
GAQAAVGDL

SEQ ID NO: 9794 - protein, 9 aa, Homo sapiens
VVYSQVWSM

SEQ ID NO: 9795 - protein, 9 aa, Homo sapiens
SPTPDMEEL

SEQ ID NO: 9796 - protein, 9 aa, Homo sapiens
SRPNPQEFT

SEQ ID NO: 9797 - protein, 9 aa, Homo sapiens
SRPVLTLRS

SEQ ID NO: 9798 - protein, 9 aa, Homo sapiens
CEANNGLGA

SEQ ID NO: 9799 - protein, 9 aa, Homo sapiens
LEIPAVKES

SEQ ID NO: 9800 - protein, 9 aa, Homo sapiens
QEFTYSSPT

SEQ ID NO: 9801 - protein, 9 aa, Homo sapiens
SEAVPVSIS

SEQ ID NO: 9802 - protein, 9 aa, Homo sapiens
VDVVYSQVW

SEQ ID NO: 9803 - protein, 9 aa, Homo sapiens
AEHSGNYSC

SEQ ID NO: 9804 - protein, 9 aa, Homo sapiens
RDLMTAGVL

SEQ ID NO: 9805 - protein, 9 aa, Homo sapiens
ASFNLSLTA

SEQ ID NO: 9806 - protein, 9 aa, Homo sapiens
LENKDSQVI

SEQ ID NO: 9807 - protein, 9 aa, Homo sapiens
AAVGDLLEL

SEQ ID NO: 9808 - protein, 9 aa, Homo sapiens
KESDAGKYY

SEQ ID NO: 9809 - protein, 9 aa, Homo sapiens
EELQPVYVN

SEQ ID NO: 9810 - protein, 9 aa, Homo sapiens
LGFTGVALL

SEQ ID NO: 9811 - protein, 9 aa, Homo sapiens
EDVTLGNSS

SEQ ID NO: 9812 - protein, 9 aa, Homo sapiens
TGVALLLYA

SEQ ID NO: 9813 - protein, 9 aa, Homo sapiens
HEDVTLGNS

SEQ ID NO: 9814 - protein, 9 aa, Homo sapiens
GGASFNLSL

SEQ ID NO: 9815 - protein, 9 aa, Homo sapiens
SSAPSGGGA

SEQ ID NO: 9816 - protein, 9 aa, Homo sapiens
MEELQPVYV

SEQ ID NO: 9817 - protein, 9 aa, Homo sapiens
AELEIPAVK

SEQ ID NO: 9818 - protein, 9 aa, Homo sapiens
RDLMTAGVL

SEQ ID NO: 9819 - protein, 9 aa, Homo sapiens
AAVGDLLEL

SEQ ID NO: 9820 - protein, 9 aa, Homo sapiens
MEELQPVYV

SEQ ID NO: 9821 - protein, 9 aa, Homo sapiens
GGASFNLSL

SEQ ID NO: 9822 - protein, 9 aa, Homo sapiens
CEANNGLGA

SEQ ID NO: 9823 - protein, 9 aa, Homo sapiens
SSANIRTLL

SEQ ID NO: 9824 - protein, 9 aa, Homo sapiens
MTAGVLWGL

SEQ ID NO: 9825 - protein, 9 aa, Homo sapiens
LENKDSQVI

SEQ ID NO: 9826 - protein, 9 aa, Homo sapiens
ESSANIRTL

SEQ ID NO: 9827 - protein, 9 aa, Homo sapiens
AEHSGNYSC

SEQ ID NO: 9828 - protein, 9 aa, Homo sapiens
EELQPVYVN

SEQ ID NO: 9829 - protein, 9 aa, Homo sapiens
AQAAVGDLL

SEQ ID NO: 9830 - protein, 9 aa, Homo sapiens
YSCEANNGL

SEQ ID NO: 9831 - protein, 9 aa, Homo sapiens
QEFTYSSPT

SEQ ID NO: 9832 - protein, 9 aa, Homo sapiens
MGKKTQRSL

SEQ ID NO: 9833 - protein, 9 aa, Homo sapiens
LGFTGVALL

SEQ ID NO: 9834 - protein, 9 aa, Homo sapiens
SGGGASFNL

SEQ ID NO: 9835 - protein, 9 aa, Homo sapiens
GPDGYRRDL

SEQ ID NO: 9836 - protein, 9 aa, Homo sapiens
GAQAAVGDL

SEQ ID NO: 9837 - protein, 9 aa, Homo sapiens
SPTPDMEEL

SEQ ID NO: 9838 - protein, 9 aa, Homo sapiens
CEANNGLGA

SEQ ID NO: 9839 - protein, 9 aa, Homo sapiens
MEELQPVYV

SEQ ID NO: 9840 - protein, 9 aa, Homo sapiens
QEFTYSSPT

SEQ ID NO: 9841 - protein, 9 aa, Homo sapiens
LENKDSQVI

SEQ ID NO: 9842 - protein, 9 aa, Homo sapiens
AEHSGNYSC

SEQ ID NO: 9843 - protein, 9 aa, Homo sapiens
EELQPVYVN

SEQ ID NO: 9844 - protein, 9 aa, Homo sapiens
RDLMTAGVL

SEQ ID NO: 9845 - protein, 9 aa, Homo sapiens
LGAQCSEAV

SEQ ID NO: 9846 - protein, 9 aa, Homo sapiens
FGVLGFTGV

SEQ ID NO: 9847 - protein, 9 aa, Homo sapiens
VNIPVRIPV

SEQ ID NO: 9848 - protein, 9 aa, Homo sapiens
SAELEIPAV

SEQ ID NO: 9849 - protein, 9 aa, Homo sapiens
SEAVPVSIS

SEQ ID NO: 9850 - protein, 9 aa, Homo sapiens
LEIPAVKES

SEQ ID NO: 9851 - protein, 9 aa, Homo sapiens
ASFNLSLTA

SEQ ID NO: 9852 - protein, 9 aa, Homo sapiens
RSPGAQAAV

SEQ ID NO: 9853 - protein, 9 aa, Homo sapiens
TGVALLLYA

SEQ ID NO: 9854 - protein, 9 aa, Homo sapiens
PDMEELQPV

SEQ ID NO: 9855 - protein, 9 aa, Homo sapiens
YCRADNGHV

SEQ ID NO: 9856 - protein, 9 aa, Homo sapiens
IPAVKESDA

SEQ ID NO: 9857 - protein, 9 aa, Homo sapiens
LSAELEIPA

SEQ ID NO: 9858 - protein, 9 aa, Homo sapiens
TQRSLSAEL

SEQ ID NO: 9859 - protein, 9 aa, Homo sapiens
TAGVLWGLF

SEQ ID NO: 9860 - protein, 9 aa, Homo sapiens
AQAAVGDLL

SEQ ID NO: 9861 - protein, 9 aa, Homo sapiens
ALRGSPPIL

SEQ ID NO: 9862 - protein, 9 aa, Homo sapiens
DLMTAGVLW

SEQ ID NO: 9863 - protein, 9 aa, Homo sapiens
TLRSPGAQA

SEQ ID NO: 9864 - protein, 9 aa, Homo sapiens
ELQPVYVNV

SEQ ID NO: 9865 - protein, 9 aa, Homo sapiens
VLWGLFGVL

SEQ ID NO: 9866 - protein, 9 aa, Homo sapiens
GLFGVLGFT

SEQ ID NO: 9867 - protein, 9 aa, Homo sapiens
FTGVALLLY

SEQ ID NO: 9868 - protein, 9 aa, Homo sapiens
APSGGGASF

SEQ ID NO: 9869 - protein, 9 aa, Homo sapiens
WGLFGVLGF

SEQ ID NO: 9870 - protein, 9 aa, Homo sapiens
AQCSEAVPV

SEQ ID NO: 9871 - protein, 9 aa, Homo sapiens
VLGFTGVAL

SEQ ID NO: 9872 - protein, 9 aa, Homo sapiens
QQPESSANI

SEQ ID NO: 9873 - protein, 9 aa, Homo sapiens
DLLELHCEA

SEQ ID NO: 9874 - protein, 9 aa, Homo sapiens
GLGAQCSEA

SEQ ID NO: 9875 - protein, 9 aa, Homo sapiens
LLYALFHKI

SEQ ID NO: 9876 - protein, 9 aa, Homo sapiens
VALLLYALF

SEQ ID NO: 9877 - protein, 9 aa, Homo sapiens
SPPILYQFY

SEQ ID NO: 9878 - protein, 9 aa, Homo sapiens
ALRGSPPIL

SEQ ID NO: 9879 - protein, 9 aa, Homo sapiens
SPTPDMEEL

SEQ ID NO: 9880 - protein, 9 aa, Homo sapiens
TQRSLSAEL

SEQ ID NO: 9881 - protein, 9 aa, Homo sapiens
GPDGYRRDL

SEQ ID NO: 9882 - protein, 9 aa, Homo sapiens
AAVGDLLEL

SEQ ID NO: 9883 - protein, 9 aa, Homo sapiens
GVALLLYAL

SEQ ID NO: 9884 - protein, 9 aa, Homo sapiens
AQAAVGDLL

SEQ ID NO: 9885 - protein, 9 aa, Homo sapiens
GAQAAVGDL

SEQ ID NO: 9886 - protein, 9 aa, Homo sapiens
SSANIRTLL

SEQ ID NO: 9887 - protein, 9 aa, Homo sapiens
RIPVSRPVL

SEQ ID NO: 9888 - protein, 9 aa, Homo sapiens
VVYSQVWSM

SEQ ID NO: 9889 - protein, 9 aa, Homo sapiens
SGGGASFNL

SEQ ID NO: 9890 - protein, 9 aa, Homo sapiens
MGKKTQRSL

SEQ ID NO: 9891 - protein, 9 aa, Homo sapiens
YSCEANNGL

SEQ ID NO: 9892 - protein, 9 aa, Homo sapiens
ESSANIRTL

SEQ ID NO: 9893 - protein, 9 aa, Homo sapiens
LGFTGVALL

SEQ ID NO: 9894 - protein, 9 aa, Homo sapiens
GGASFNLSL

SEQ ID NO: 9895 - protein, 9 aa, Homo sapiens
VLGFTGVAL

SEQ ID NO: 9896 - protein, 9 aa, Homo sapiens
MTAGVLWGL

SEQ ID NO: 9897 - protein, 9 aa, Homo sapiens
EPRGASRPN

SEQ ID NO: 9898 - protein, 9 aa, Homo sapiens
ALRGSPPIL

SEQ ID NO: 9899 - protein, 9 aa, Homo sapiens
TQRSLSAEL

SEQ ID NO: 9900 - protein, 9 aa, Homo sapiens
EPRGASRPN

SEQ ID NO: 9901 - protein, 9 aa, Homo sapiens
GAQAAVGDL

SEQ ID NO: 9902 - protein, 9 aa, Homo sapiens
IPVSRPVLT

SEQ ID NO: 9903 - protein, 9 aa, Homo sapiens
IPAVKESDA

SEQ ID NO: 9904 - protein, 9 aa, Homo sapiens
MGKKTQRSL

SEQ ID NO: 9905 - protein, 9 aa, Homo sapiens
QSKVVNIPV

SEQ ID NO: 9906 - protein, 9 aa, Homo sapiens
YCRADNGHV

SEQ ID NO: 9907 - protein, 9 aa, Homo sapiens
ESSANIRTL

SEQ ID NO: 9908 - protein, 9 aa, Homo sapiens
VLTLRSPGA

SEQ ID NO: 9909 - protein, 9 aa, Homo sapiens
VLGFTGVAL

SEQ ID NO: 9910 - protein, 9 aa, Homo sapiens
TLRSPGAQA

SEQ ID NO: 9911 - protein, 9 aa, Homo sapiens
EALRGSPPI

SEQ ID NO: 9912 - protein, 9 aa, Homo sapiens
VLWGLFGVL

SEQ ID NO: 9913 - protein, 9 aa, Homo sapiens
ENKDSQVIY

SEQ ID NO: 9914 - protein, 9 aa, Homo sapiens
YSCEANNGL

SEQ ID NO: 9915 - protein, 9 aa, Homo sapiens
LLENKDSQV

SEQ ID NO: 9916 - protein, 9 aa, Homo sapiens
MTAGVLWGL

SEQ ID NO: 9917 - protein, 9 aa, Homo sapiens
SSANIRTLL

SEQ ID NO: 9918 - protein, 9 aa, Homo sapiens
LRGSPPILY

SEQ ID NO: 9919 - protein, 9 aa, Homo sapiens
RRDLMTAGV

SEQ ID NO: 9920 - protein, 9 aa, Homo sapiens
SRPNPQEFT

SEQ ID NO: 9921 - protein, 9 aa, Homo sapiens
LRSPGAQAA

SEQ ID NO: 9922 - protein, 9 aa, Homo sapiens
YQFYHEDVT

SEQ ID NO: 9923 - protein, 9 aa, Homo sapiens
SRPVLTLRS

SEQ ID NO: 9924 - protein, 9 aa, Homo sapiens
VRIPVSRPV

SEQ ID NO: 9925 - protein, 9 aa, Homo sapiens
QQPESSANI

SEQ ID NO: 9926 - protein, 9 aa, Homo sapiens
AQAAVGDLL

SEQ ID NO: 9927 - protein, 9 aa, Homo sapiens
TQRSLSAEL

SEQ ID NO: 9928 - protein, 9 aa, Homo sapiens
VLWGLFGVL

SEQ ID NO: 9929 - protein, 9 aa, Homo sapiens
LLYALFHKI

SEQ ID NO: 9930 - protein, 9 aa, Homo sapiens
RPNPQEFTY

SEQ ID NO: 9931 - protein, 9 aa, Homo sapiens
KESDAGKYY

SEQ ID NO: 9932 - protein, 9 aa, Homo sapiens
AQCSEAVPV

SEQ ID NO: 9933 - protein, 9 aa, Homo sapiens
IRTLLENKD

SEQ ID NO: 9934 - protein, 9 aa, Homo sapiens
QRSLSAELE

SEQ ID NO: 9935 - protein, 9 aa, Homo sapiens
YRRDLMTAG

SEQ ID NO: 9936 - protein, 9 aa, Homo sapiens
CRADNGHVP

SEQ ID NO: 9937 - protein, 9 aa, Homo sapiens
QEFTYSSPT

SEQ ID NO: 9938 - protein, 9 aa, Homo sapiens
RRDLMTAGV

SEQ ID NO: 9939 - protein, 9 aa, Homo sapiens
LRGSPPILY

SEQ ID NO: 9940 - protein, 9 aa, Homo sapiens
TQRSLSAEL

SEQ ID NO: 9941 - protein, 9 aa, Homo sapiens
SQVIYSSVK

SEQ ID NO: 9942 - protein, 9 aa, Homo sapiens
LRSPGAQAA

SEQ ID NO: 9943 - protein, 9 aa, Homo sapiens
AQAAVGDLL

SEQ ID NO: 9944 - protein, 9 aa, Homo sapiens
SRPVLTLRS

SEQ ID NO: 9945 - protein, 9 aa, Homo sapiens
SRPNPQEFT

SEQ ID NO: 9946 - protein, 9 aa, Homo sapiens
VRIPVSRPV

SEQ ID NO: 9947 - protein, 9 aa, Homo sapiens
VLWGLFGVL

SEQ ID NO: 9948 - protein, 9 aa, Homo sapiens
YQFYHEDVT

SEQ ID NO: 9949 - protein, 9 aa, Homo sapiens
AQCSEAVPV

SEQ ID NO: 9950 - protein, 9 aa, Homo sapiens
QQPESSANI

SEQ ID NO: 9951 - protein, 9 aa, Homo sapiens
LLYALFHKI

SEQ ID NO: 9952 - protein, 9 aa, Homo sapiens
RIPVSRPVL

SEQ ID NO: 9953 - protein, 9 aa, Homo sapiens
LLELHCEAL

SEQ ID NO: 9954 - protein, 9 aa, Homo sapiens
ALRGSPPIL

SEQ ID NO: 9955 - protein, 9 aa, Homo sapiens
LLLYALFHK

SEQ ID NO: 9956 - protein, 9 aa, Homo sapiens
AELEIPAVK

SEQ ID NO: 9957 - protein, 9 aa, Homo sapiens
VLGFTGVAL

SEQ ID NO: 9958 - protein, 9 aa, Homo sapiens
RPNPQEFTY

SEQ ID NO: 9959 - protein, 9 aa, Homo sapiens
SPPILYQFY

SEQ ID NO: 9960 - protein, 9 aa, Homo sapiens
SPTPDMEEL

SEQ ID NO: 9961 - protein, 9 aa, Homo sapiens
GSVDVDVVY

SEQ ID NO: 9962 - protein, 9 aa, Homo sapiens
APSGGGASF

SEQ ID NO: 9963 - protein, 9 aa, Homo sapiens
ASRPNPQEF

SEQ ID NO: 9964 - protein, 9 aa, Homo sapiens
ENKDSQVIY

SEQ ID NO: 9965 - protein, 9 aa, Homo sapiens
YSCEANNGL

SEQ ID NO: 9966 - protein, 9 aa, Homo sapiens
VSISGPDGY

SEQ ID NO: 9967 - protein, 9 aa, Homo sapiens
EPRGASRPN

SEQ ID NO: 9968 - protein, 9 aa, Homo sapiens
GPDGYRRDL

SEQ ID NO: 9969 - protein, 9 aa, Homo sapiens
GSPPILYQF

SEQ ID NO: 9970 - protein, 9 aa, Homo sapiens
ESSANIRTL

SEQ ID NO: 9971 - protein, 9 aa, Homo sapiens
SSANIRTLL

SEQ ID NO: 9972 - protein, 9 aa, Homo sapiens
AAVGDLLEL

SEQ ID NO: 9973 - protein, 9 aa, Homo sapiens
LTAEHSGNY

SEQ ID NO: 9974 - protein, 9 aa, Homo sapiens
NPQEFTYSS

SEQ ID NO: 9975 - protein, 9 aa, Homo sapiens
RSLSAELEI

SEQ ID NO: 9976 - protein, 9 aa, Homo sapiens
TAGVLWGLF

SEQ ID NO: 9977 - protein, 9 aa, Homo sapiens
QSKVVNIPV

SEQ ID NO: 9978 - protein, 9 aa, Homo sapiens
RDLMTAGVL

SEQ ID NO: 9979 - protein, 9 aa, Homo sapiens
LENKDSQVI

SEQ ID NO: 9980 - protein, 9 aa, Homo sapiens
SSANIRTLL

SEQ ID NO: 9981 - protein, 9 aa, Homo sapiens
AQAAVGDLL

SEQ ID NO: 9982 - protein, 9 aa, Homo sapiens
GFTGVALLL

SEQ ID NO: 9983 - protein, 9 aa, Homo sapiens
KDSQVIYSS

SEQ ID NO: 9984 - protein, 9 aa, Homo sapiens
LGFTGVALL

SEQ ID NO: 9985 - protein, 9 aa, Homo sapiens
VDVVYSQVW

SEQ ID NO: 9986 - protein, 9 aa, Homo sapiens
PDGYRRDLM

SEQ ID NO: 9987 - protein, 9 aa, Homo sapiens
EDVTLGNSS

SEQ ID NO: 9988 - protein, 9 aa, Homo sapiens
KESDAGKYY

SEQ ID NO: 9989 - protein, 9 aa, Homo sapiens
MEELQPVYV

SEQ ID NO: 9990 - protein, 9 aa, Homo sapiens
KVVNIPVRI

SEQ ID NO: 9991 - protein, 9 aa, Homo sapiens
MTAGVLWGL

SEQ ID NO: 9992 - protein, 9 aa, Homo sapiens
CSEAVPVSI

SEQ ID NO: 9993 - protein, 9 aa, Homo sapiens
SGGGASFNL

SEQ ID NO: 9994 - protein, 9 aa, Homo sapiens
EALRGSPPI

SEQ ID NO: 9995 - protein, 9 aa, Homo sapiens
AEHSGNYSC

SEQ ID NO: 9996 - protein, 9 aa, Homo sapiens
AAVGDLLEL

SEQ ID NO: 9997 - protein, 9 aa, Homo sapiens
LRGSPPILY

SEQ ID NO: 9998 - protein, 9 aa, Homo sapiens
YHEDVTLGN

SEQ ID NO: 9999 - protein, 9 aa, Homo sapiens
GPDGYRRDL

SEQ ID NO: 10000 - protein, 9 aa, Homo sapiens
GHVPIQSKV

SEQ ID NO: 10001 - protein, 9 aa, Homo sapiens
LHCEALRGS

SEQ ID NO: 10002 - protein, 9 aa, Homo sapiens
GFTGVALLL

SEQ ID NO: 10003 - protein, 9 aa, Homo sapiens
APSGGGASF

SEQ ID NO: 10004 - protein, 9 aa, Homo sapiens
LLELHCEAL

SEQ ID NO: 10005 - protein, 9 aa, Homo sapiens
MTAGVLWGL

SEQ ID NO: 10006 - protein, 9 aa, Homo sapiens
VLWGLFGVL

SEQ ID NO: 10007 - protein, 9 aa, Homo sapiens
YSCEANNGL

SEQ ID NO: 10008 - protein, 9 aa, Homo sapiens
SGGGASFNL

SEQ ID NO: 10009 - protein, 9 aa, Homo sapiens
SPTPDMEEL

SEQ ID NO: 10010 - protein, 9 aa, Homo sapiens
AAVGDLLEL

SEQ ID NO: 10011 - protein, 9 aa, Homo sapiens
QFYHEDVTL

SEQ ID NO: 10012 - protein, 9 aa, Homo sapiens
GAQAAVGDL

SEQ ID NO: 10013 - protein, 9 aa, Homo sapiens
TAGVLWGLF

SEQ ID NO: 10014 - protein, 9 aa, Homo sapiens
GVALLLYAL

SEQ ID NO: 10015 - protein, 9 aa, Homo sapiens
SSANIRTLL

SEQ ID NO: 10016 - protein, 9 aa, Homo sapiens
AQAAVGDLL

SEQ ID NO: 10017 - protein, 9 aa, Homo sapiens
GSPPILYQF

SEQ ID NO: 10018 - protein, 9 aa, Homo sapiens
GHVPIQSKV

SEQ ID NO: 10019 - protein, 9 aa, Homo sapiens
YHEDVTLGN

SEQ ID NO: 10020 - protein, 9 aa, Homo sapiens
RRDLMTAGV

SEQ ID NO: 10021 - protein, 9 aa, Homo sapiens
VRIPVSRPV

SEQ ID NO: 10022 - protein, 9 aa, Homo sapiens
AAVGDLLEL

SEQ ID NO: 10023 - protein, 9 aa, Homo sapiens
LGFTGVALL

SEQ ID NO: 10024 - protein, 9 aa, Homo sapiens
LHCEALRGS

SEQ ID NO: 10025 - protein, 9 aa, Homo sapiens
LLELHCEAL

SEQ ID NO: 10026 - protein, 9 aa, Homo sapiens
YSCEANNGL

SEQ ID NO: 10027 - protein, 9 aa, Homo sapiens
VLWGLFGVL

SEQ ID NO: 10028 - protein, 9 aa, Homo sapiens
SAELEIPAV

SEQ ID NO: 10029 - protein, 9 aa, Homo sapiens
GPDGYRRDL

SEQ ID NO: 10030 - protein, 9 aa, Homo sapiens
MTAGVLWGL

SEQ ID NO: 10031 - protein, 9 aa, Homo sapiens
GAQAAVGDL

SEQ ID NO: 10032 - protein, 9 aa, Homo sapiens
GVALLLYAL

SEQ ID NO: 10033 - protein, 9 aa, Homo sapiens
ESSANIRTL

SEQ ID NO: 10034 - protein, 9 aa, Homo sapiens
SPTPDMEEL

SEQ ID NO: 10035 - protein, 9 aa, Homo sapiens
DVDVVYSQV

SEQ ID NO: 10036 - protein, 9 aa, Homo sapiens
VVYSQVWSM

SEQ ID NO: 10037 - protein, 9 aa, Homo sapiens
QFYHEDVTL

SEQ ID NO: 10038 - protein, 9 aa, Homo sapiens
AQAAVGDLL

SEQ ID NO: 10039 - protein, 9 aa, Homo sapiens
TQRSLSAEL

SEQ ID NO: 10040 - protein, 9 aa, Homo sapiens
GGASFNLSL

SEQ ID NO: 10041 - protein, 9 aa, Homo sapiens
GVALLLYAL

SEQ ID NO: 10042 - protein, 9 aa, Homo sapiens
GPDGYRRDL

SEQ ID NO: 10043 - protein, 9 aa, Homo sapiens
MTAGVLWGL

SEQ ID NO: 10044 - protein, 9 aa, Homo sapiens
SSANIRTLL

SEQ ID NO: 10045 - protein, 9 aa, Homo sapiens
VLWGLFGVL

SEQ ID NO: 10046 - protein, 9 aa, Homo sapiens
GFTGVALLL

SEQ ID NO: 10047 - protein, 9 aa, Homo sapiens
LGFTGVALL

SEQ ID NO: 10048 - protein, 9 aa, Homo sapiens
RIPVSRPVL

SEQ ID NO: 10049 - protein, 9 aa, Homo sapiens
LLELHCEAL

SEQ ID NO: 10050 - protein, 9 aa, Homo sapiens
YSCEANNGL

SEQ ID NO: 10051 - protein, 9 aa, Homo sapiens
ESSANIRTL

SEQ ID NO: 10052 - protein, 9 aa, Homo sapiens
GAQAAVGDL

SEQ ID NO: 10053 - protein, 9 aa, Homo sapiens
SPTPDMEEL

SEQ ID NO: 10054 - protein, 9 aa, Homo sapiens
AAVGDLLEL

SEQ ID NO: 10055 - protein, 9 aa, Homo sapiens
QFYHEDVTL

SEQ ID NO: 10056 - protein, 9 aa, Homo sapiens
VLGFTGVAL

SEQ ID NO: 10057 - protein, 9 aa, Homo sapiens
SGGGASFNL

SEQ ID NO: 10058 - protein, 9 aa, Homo sapiens
KESDAGKYY

SEQ ID NO: 10059 - protein, 9 aa, Homo sapiens
LEIPAVKES

SEQ ID NO: 10060 - protein, 9 aa, Homo sapiens
SEAVPVSIS

SEQ ID NO: 10061 - protein, 9 aa, Homo sapiens
VSISGPDGY

SEQ ID NO: 10062 - protein, 9 aa, Homo sapiens
GSVDVDVVY

SEQ ID NO: 10063 - protein, 9 aa, Homo sapiens
SPPILYQFY

SEQ ID NO: 10064 - protein, 9 aa, Homo sapiens
RPNPQEFTY

SEQ ID NO: 10065 - protein, 9 aa, Homo sapiens
CEANNGLGA

SEQ ID NO: 10066 - protein, 9 aa, Homo sapiens
AEHSGNYSC

SEQ ID NO: 10067 - protein, 9 aa, Homo sapiens
EELQPVYVN

SEQ ID NO: 10068 - protein, 9 aa, Homo sapiens
FTGVALLLY

SEQ ID NO: 10069 - protein, 9 aa, Homo sapiens
WGLFGVLGF

SEQ ID NO: 10070 - protein, 9 aa, Homo sapiens
LTAEHSGNY

SEQ ID NO: 10071 - protein, 9 aa, Homo sapiens
HEDVTLGNS

SEQ ID NO: 10072 - protein, 9 aa, Homo sapiens
QEFTYSSPT

SEQ ID NO: 10073 - protein, 9 aa, Homo sapiens
LENKDSQVI

SEQ ID NO: 10074 - protein, 9 aa, Homo sapiens
ASRPNPQEF

SEQ ID NO: 10075 - protein, 9 aa, Homo sapiens
MEELQPVYV

SEQ ID NO: 10076 - protein, 9 aa, Homo sapiens
GSPPILYQF

SEQ ID NO: 10077 - protein, 9 aa, Homo sapiens
APSGGGASF

SEQ ID NO: 10078 - protein, 9 aa, Homo sapiens
EALRGSPPI

SEQ ID NO: 10079 - protein, 9 aa, Homo sapiens
GPDGYRRDL

SEQ ID NO: 10080 - protein, 9 aa, Homo sapiens
RADNGHVPI

SEQ ID NO: 10081 - protein, 9 aa, Homo sapiens
SPTPDMEEL

SEQ ID NO: 10082 - protein, 9 aa, Homo sapiens
SAELEIPAV

SEQ ID NO: 10083 - protein, 9 aa, Homo sapiens
AAVGDLLEL

SEQ ID NO: 10084 - protein, 9 aa, Homo sapiens
VGSVDVDVV

SEQ ID NO: 10085 - protein, 9 aa, Homo sapiens
FGVLGFTGV

SEQ ID NO: 10086 - protein, 9 aa, Homo sapiens
LGAQCSEAV

SEQ ID NO: 10087 - protein, 9 aa, Homo sapiens
LGFTGVALL

SEQ ID NO: 10088 - protein, 9 aa, Homo sapiens
GAQAAVGDL

SEQ ID NO: 10089 - protein, 9 aa, Homo sapiens
MGKKTQRSL

SEQ ID NO: 10090 - protein, 9 aa, Homo sapiens
SGGGASFNL

SEQ ID NO: 10091 - protein, 9 aa, Homo sapiens
GGASFNLSL

SEQ ID NO: 10092 - protein, 9 aa, Homo sapiens
IPAVKESDA

SEQ ID NO: 10093 - protein, 9 aa, Homo sapiens
EPRGASRPN

SEQ ID NO: 10094 - protein, 9 aa, Homo sapiens
IPVSRPVLT

SEQ ID NO: 10095 - protein, 9 aa, Homo sapiens
DAGKYYCRA

SEQ ID NO: 10096 - protein, 9 aa, Homo sapiens
LLYALFHKI

SEQ ID NO: 10097 - protein, 9 aa, Homo sapiens
DGYRRDLMT

SEQ ID NO: 10098 - protein, 9 aa, Homo sapiens
EALRGSPPI

SEQ ID NO: 10099 - protein, 9 aa, Homo sapiens
FGVLGFTGV

SEQ ID NO: 10100 - protein, 9 aa, Homo sapiens
AAVGDLLEL

SEQ ID NO: 10101 - protein, 9 aa, Homo sapiens
LGFTGVALL

SEQ ID NO: 10102 - protein, 9 aa, Homo sapiens
RADNGHVPI

SEQ ID NO: 10103 - protein, 9 aa, Homo sapiens
SPTPDMEEL

SEQ ID NO: 10104 - protein, 9 aa, Homo sapiens
GPDGYRRDL

SEQ ID NO: 10105 - protein, 9 aa, Homo sapiens
SAELEIPAV

SEQ ID NO: 10106 - protein, 9 aa, Homo sapiens
GAQAAVGDL

SEQ ID NO: 10107 - protein, 9 aa, Homo sapiens
LGAQCSEAV

SEQ ID NO: 10108 - protein, 9 aa, Homo sapiens
LLYALFHKI

SEQ ID NO: 10109 - protein, 9 aa, Homo sapiens
VGSVDVDVV

SEQ ID NO: 10110 - protein, 9 aa, Homo sapiens
IPVSRPVLT

SEQ ID NO: 10111 - protein, 9 aa, Homo sapiens
KVVNIPVRI

SEQ ID NO: 10112 - protein, 9 aa, Homo sapiens
SGGGASFNL

SEQ ID NO: 10113 - protein, 9 aa, Homo sapiens
GGASFNLSL

SEQ ID NO: 10114 - protein, 9 aa, Homo sapiens
QPVYVNVGS

SEQ ID NO: 10115 - protein, 9 aa, Homo sapiens
VPIQSKVVN

SEQ ID NO: 10116 - protein, 9 aa, Homo sapiens
MGKKTQRSL

SEQ ID NO: 10117 - protein, 9 aa, Homo sapiens
RSLSAELEI

SEQ ID NO: 10118 - protein, 9 aa, Homo sapiens
RADNGHVPI

SEQ ID NO: 10119 - protein, 9 aa, Homo sapiens
EALRGSPPI

SEQ ID NO: 10120 - protein, 9 aa, Homo sapiens
SAELEIPAV

SEQ ID NO: 10121 - protein, 9 aa, Homo sapiens
FGVLGFTGV

SEQ ID NO: 10122 - protein, 9 aa, Homo sapiens
VGSVDVDVV

SEQ ID NO: 10123 - protein, 9 aa, Homo sapiens
LGAQCSEAV

SEQ ID NO: 10124 - protein, 9 aa, Homo sapiens
GAQAAVGDL

SEQ ID NO: 10125 - protein, 9 aa, Homo sapiens
AAVGDLLEL

SEQ ID NO: 10126 - protein, 9 aa, Homo sapiens
LGFTGVALL

SEQ ID NO: 10127 - protein, 9 aa, Homo sapiens
DGYRRDLMT

SEQ ID NO: 10128 - protein, 9 aa, Homo sapiens
GPDGYRRDL

SEQ ID NO: 10129 - protein, 9 aa, Homo sapiens
SGGGASFNL

SEQ ID NO: 10130 - protein, 9 aa, Homo sapiens
MGKKTQRSL

SEQ ID NO: 10131 - protein, 9 aa, Homo sapiens
SPTPDMEEL

SEQ ID NO: 10132 - protein, 9 aa, Homo sapiens
GGASFNLSL

SEQ ID NO: 10133 - protein, 9 aa, Homo sapiens
LLYALFHKI

SEQ ID NO: 10134 - protein, 9 aa, Homo sapiens
DAGKYYCRA

SEQ ID NO: 10135 - protein, 9 aa, Homo sapiens
GASFNLSLT

SEQ ID NO: 10136 - protein, 9 aa, Homo sapiens
SATNEPRGA

SEQ ID NO: 10137 - protein, 9 aa, Homo sapiens
DVDVVYSQV

SEQ ID NO: 10138 - protein, 9 aa, Homo sapiens
VGSVDVDVV

SEQ ID NO: 10139 - protein, 9 aa, Homo sapiens
YQFYHEDVT

SEQ ID NO: 10140 - protein, 9 aa, Homo sapiens
VLWGLFGVL

SEQ ID NO: 10141 - protein, 9 aa, Homo sapiens
HVPIQSKVV

SEQ ID NO: 10142 - protein, 9 aa, Homo sapiens
QQPESSANI

SEQ ID NO: 10143 - protein, 9 aa, Homo sapiens
LENKDSQVI

SEQ ID NO: 10144 - protein, 9 aa, Homo sapiens
LLYALFHKI

SEQ ID NO: 10145 - protein, 9 aa, Homo sapiens
LGFTGVALL

SEQ ID NO: 10146 - protein, 9 aa, Homo sapiens
AQCSEAVPV

SEQ ID NO: 10147 - protein, 9 aa, Homo sapiens
LGAQCSEAV

SEQ ID NO: 10148 - protein, 9 aa, Homo sapiens
FGVLGFTGV

SEQ ID NO: 10149 - protein, 9 aa, Homo sapiens
SPPILYQFY

SEQ ID NO: 10150 - protein, 9 aa, Homo sapiens
WGLFGVLGF

SEQ ID NO: 10151 - protein, 9 aa, Homo sapiens
DGYRRDLMT

SEQ ID NO: 10152 - protein, 9 aa, Homo sapiens
VNIPVRIPV

SEQ ID NO: 10153 - protein, 9 aa, Homo sapiens
RDLMTAGVL

SEQ ID NO: 10154 - protein, 9 aa, Homo sapiens
DVDVVYSQV

SEQ ID NO: 10155 - protein, 9 aa, Homo sapiens
RIPVSRPVL

SEQ ID NO: 10156 - protein, 9 aa, Homo sapiens
AQAAVGDLL

SEQ ID NO: 10157 - protein, 9 aa, Homo sapiens
APSGGGASF

SEQ ID NO: 10158 - protein, 9 aa, Homo sapiens
GSPPILYQF

SEQ ID NO: 10159 - protein, 9 aa, Homo sapiens
ASRPNPQEF

SEQ ID NO: 10160 - protein, 9 aa, Homo sapiens
VALLLYALF

SEQ ID NO: 10161 - protein, 9 aa, Homo sapiens
TAGVLWGLF

SEQ ID NO: 10162 - protein, 9 aa, Homo sapiens
LTAEHSGNY

SEQ ID NO: 10163 - protein, 9 aa, Homo sapiens
GSVDVDVVY

SEQ ID NO: 10164 - protein, 9 aa, Homo sapiens
FTGVALLLY

SEQ ID NO: 10165 - protein, 9 aa, Homo sapiens
RSLSAELEI

SEQ ID NO: 10166 - protein, 9 aa, Homo sapiens
RSPGAQAAV

SEQ ID NO: 10167 - protein, 9 aa, Homo sapiens
VSISGPDGY

SEQ ID NO: 10168 - protein, 9 aa, Homo sapiens
LSAELEIPA

SEQ ID NO: 10169 - protein, 9 aa, Homo sapiens
YSCEANNGL

SEQ ID NO: 10170 - protein, 9 aa, Homo sapiens
SSAPSGGGA

SEQ ID NO: 10171 - protein, 9 aa, Homo sapiens
ASFNLSLTA

SEQ ID NO: 10172 - protein, 9 aa, Homo sapiens
MTAGVLWGL

SEQ ID NO: 10173 - protein, 9 aa, Homo sapiens
RADNGHVPI

SEQ ID NO: 10174 - protein, 9 aa, Homo sapiens
QSKVVNIPV

SEQ ID NO: 10175 - protein, 9 aa, Homo sapiens
SSANTRTLL

SEQ ID NO: 10176 - protein, 9 aa, Homo sapiens
CSEAVPVSI

SEQ ID NO: 10177 - protein, 9 aa, Homo sapiens
WGLFGVLGF

SEQ ID NO: 10178 - protein, 9 aa, Homo sapiens
VALLLYALF

SEQ ID NO: 10179 - protein, 9 aa, Homo sapiens
AAVGDLLEL

SEQ ID NO: 10180 - protein, 9 aa, Homo sapiens
LLYALFHKI

SEQ ID NO: 10181 - protein, 9 aa, Homo sapiens
RDLMTAGVL

SEQ ID NO: 10182 - protein, 9 aa, Homo sapiens
SPTPDMEEL

SEQ ID NO: 10183 - protein, 9 aa, Homo sapiens
EALRGSPPI

SEQ ID NO: 10184 - protein, 9 aa, Homo sapiens
QFYHEDVTL

SEQ ID NO: 10185 - protein, 9 aa, Homo sapiens
VRIPVSRPV

SEQ ID NO: 10186 - protein, 9 aa, Homo sapiens
VLWGLFGVL

SEQ ID NO: 10187 - protein, 9 aa, Homo sapiens
GHVPIQSKV

SEQ ID NO: 10188 - protein, 9 aa, Homo sapiens
LGFTGVALL

SEQ ID NO: 10189 - protein, 9 aa, Homo sapiens
KVVNIPVRI

SEQ ID NO: 10190 - protein, 9 aa, Homo sapiens
FGVLGFTGV

SEQ ID NO: 10191 - protein, 9 aa, Homo sapiens
VVYSQVWSM

SEQ ID NO: 10192 - protein, 9 aa, Homo sapiens
WGLFGVLGF

SEQ ID NO: 10193 - protein, 9 aa, Homo sapiens
GAQAAVGDL

SEQ ID NO: 10194 - protein, 9 aa, Homo sapiens
YSCEANNGL

SEQ ID NO: 10195 - protein, 9 aa, Homo sapiens
ESSANIRTL

SEQ ID NO: 10196 - protein, 9 aa, Homo sapiens
VNIPVRIPV

SEQ ID NO: 10197 - protein, 9 aa, Homo sapiens
GSPPILYQF

SEQ ID NO: 10198 - protein, 9 aa, Homo sapiens
QFYHEDVTL

SEQ ID NO: 10199 - protein, 9 aa, Homo sapiens
GFTGVALLL

SEQ ID NO: 10200 - protein, 9 aa, Homo sapiens
GPDGYRRDL

SEQ ID NO: 10201 - protein, 9 aa, Homo sapiens
SPTPDMEEL

SEQ ID NO: 10202 - protein, 9 aa, Homo sapiens
TYSSPTPDM

SEQ ID NO: 10203 - protein, 9 aa, Homo sapiens
APSGGGASF

SEQ ID NO: 10204 - protein, 9 aa, Homo sapiens
LYQFYHEDV

SEQ ID NO: 10205 - protein, 9 aa, Homo sapiens
RPNPQEFTY

SEQ ID NO: 10206 - protein, 9 aa, Homo sapiens
GYRRDLMTA

SEQ ID NO: 10207 - protein, 9 aa, Homo sapiens
SPPILYQFY

SEQ ID NO: 10208 - protein, 9 aa, Homo sapiens
LGFTGVALL

SEQ ID NO: 10209 - protein, 9 aa, Homo sapiens
GAQAAVGDL

SEQ ID NO: 10210 - protein, 9 aa, Homo sapiens
MTAGVLWGL

SEQ ID NO: 10211 - protein, 9 aa, Homo sapiens
GVALLLYAL

SEQ ID NO: 10212 - protein, 9 aa, Homo sapiens
AAVGDLLEL

SEQ ID NO: 10213 - protein, 9 aa, Homo sapiens
ESSANIRTL

SEQ ID NO: 10214 - protein, 9 aa, Homo sapiens
MGKKTQRSL

SEQ ID NO: 10215 - protein, 9 aa, Homo sapiens
YSCEANNGL

SEQ ID NO: 10216 - protein, 9 aa, Homo sapiens
GSPPILYQF

SEQ ID NO: 10217 - protein, 9 aa, Homo sapiens
VLGFTGVAL

SEQ ID NO: 10218 - protein, 9 aa, Homo sapiens
GVALLLYAL

SEQ ID NO: 10219 - protein, 9 aa, Homo sapiens
TQRSLSAEL

SEQ ID NO: 10220 - protein, 9 aa, Homo sapiens
SSANIRTLL

SEQ ID NO: 10221 - protein, 9 aa, Homo sapiens
VLWGLFGVL

SEQ ID NO: 10222 - protein, 9 aa, Homo sapiens
GGASFNLSL

SEQ ID NO: 10223 - protein, 9 aa, Homo sapiens
AAVGDLLEL

SEQ ID NO: 10224 - protein, 9 aa, Homo sapiens
ESSANIRTL

SEQ ID NO: 10225 - protein, 9 aa, Homo sapiens
GAQAAVGDL

SEQ ID NO: 10226 - protein, 9 aa, Homo sapiens
MTAGVLWGL

SEQ ID NO: 10227 - protein, 9 aa, Homo sapiens
LGFTGVALL

SEQ ID NO: 10228 - protein, 9 aa, Homo sapiens
SPPILYQFY

SEQ ID NO: 10229 - protein, 9 aa, Homo sapiens
RRDLMTAGV

SEQ ID NO: 10230 - protein, 9 aa, Homo sapiens
KVVNIPVRI

SEQ ID NO: 10231 - protein, 9 aa, Homo sapiens
DMEELQPVY

SEQ ID NO: 10232 - protein, 9 aa, Homo sapiens
LLYALFHKI

SEQ ID NO: 10233 - protein, 9 aa, Homo sapiens
GHVPIQSKV

SEQ ID NO: 10234 - protein, 9 aa, Homo sapiens
DSQVIYSSV

SEQ ID NO: 10235 - protein, 9 aa, Homo sapiens
GPDGYRRDL

SEQ ID NO: 10236 - protein, 9 aa, Homo sapiens
YSCEANNGL

SEQ ID NO: 10237 - protein, 9 aa, Homo sapiens
SPTPDMEEL

SEQ ID NO: 10238 - protein, 9 aa, Homo sapiens
SPPILYQFY

SEQ ID NO: 10239 - protein, 9 aa, Homo sapiens
RPNPQEFTY

SEQ ID NO: 10240 - protein, 9 aa, Homo sapiens
FTGVALLLY

SEQ ID NO: 10241 - protein, 9 aa, Homo sapiens
LRGSPPILY

SEQ ID NO: 10242 - protein, 9 aa, Homo sapiens
GSVDVDVVY

SEQ ID NO: 10243 - protein, 9 aa, Homo sapiens
GSPPILYQF

SEQ ID NO: 10244 - protein, 9 aa, Homo sapiens
DMEELQPVY

SEQ ID NO: 10245 - protein, 9 aa, Homo sapiens
LTAEHSGNY

SEQ ID NO: 10246 - protein, 9 aa, Homo sapiens
GVALLLYAL

SEQ ID NO: 10247 - protein, 9 aa, Homo sapiens
ENKDSQVIY

SEQ ID NO: 10248 - protein, 9 aa, Homo sapiens
KESDAGKYY

SEQ ID NO: 10249 - protein, 9 aa, Homo sapiens
MTAGVLWGL

SEQ ID NO: 10250 - protein, 9 aa, Homo sapiens
TAGVLWGLF

SEQ ID NO: 10251 - protein, 9 aa, Homo sapiens
VALLLYALF

SEQ ID NO: 10252 - protein, 9 aa, Homo sapiens
VSISGPDGY

SEQ ID NO: 10253 - protein, 9 aa, Homo sapiens
APSGGGASF

SEQ ID NO: 10254 - protein, 9 aa, Homo sapiens
SSANIRTLL

SEQ ID NO: 10255 - protein, 9 aa, Homo sapiens
GGASFNLSL

SEQ ID NO: 10256 - protein, 9 aa, Homo sapiens
LYALFHKIS

SEQ ID NO: 10257 - protein, 9 aa, Homo sapiens
AQAAVGDLL

SEQ ID NO: 10258 - protein, 9 aa, Homo sapiens
ESSANIRTL

SEQ ID NO: 10259 - protein, 9 aa, Homo sapiens
GASFNLSLT

SEQ ID NO: 10260 - protein, 9 aa, Homo sapiens
AAVGDLLEL

SEQ ID NO: 10261 - protein, 9 aa, Homo sapiens
CEANNGLGA

SEQ ID NO: 10262 - protein, 9 aa, Homo sapiens
RSLSAELEI

SEQ ID NO: 10263 - protein, 9 aa, Homo sapiens
EALRGSPPI

SEQ ID NO: 10264 - protein, 9 aa, Homo sapiens
QQPESSANI

SEQ ID NO: 10265 - protein, 9 aa, Homo sapiens
RIPVSRPVL

SEQ ID NO: 10266 - protein, 9 aa, Homo sapiens
KVVNIPVRI

SEQ ID NO: 10267 - protein, 9 aa, Homo sapiens
RDLMTAGVL

SEQ ID NO: 10268 - protein, 9 aa, Homo sapiens
SKVVNIPVR

SEQ ID NO: 10269 - protein, 9 aa, Homo sapiens
TLLENKDSQ

SEQ ID NO: 10270 - protein, 9 aa, Homo sapiens
VILGNSSAP

SEQ ID NO: 10271 - protein, 9 aa, Homo sapiens
YSCEANNGL

SEQ ID NO: 10272 - protein, 9 aa, Homo sapiens
SGGGASFNL

SEQ ID NO: 10273 - protein, 9 aa, Homo sapiens
SSANIRTLL

SEQ ID NO: 10274 - protein, 9 aa, Homo sapiens
VLWGLFGVL

SEQ ID NO: 10275 - protein, 9 aa, Homo sapiens
LGFTGVALL

SEQ ID NO: 10276 - protein, 9 aa, Homo sapiens
GAQAAVGDL

SEQ ID NO: 10277 - protein, 9 aa, Homo sapiens
GGASFNLSL

SEQ ID NO: 10278 - protein, 9 aa, Homo sapiens
SSANIRTLL

SEQ ID NO: 10279 - protein, 9 aa, Homo sapiens
ESSANIRTL

SEQ ID NO: 10280 - protein, 9 aa, Homo sapiens
AAVGDLLEL

SEQ ID NO: 10281 - protein, 9 aa, Homo sapiens
GASFNLSLT

SEQ ID NO: 10282 - protein, 9 aa, Homo sapiens
TLLENKDSQ

SEQ ID NO: 10283 - protein, 9 aa, Homo sapiens
RSLSAELEI

SEQ ID NO: 10284 - protein, 9 aa, Homo sapiens
AQAAVGDLL

SEQ ID NO: 10285 - protein, 9 aa, Homo sapiens
YSCEANNGL

SEQ ID NO: 10286 - protein, 9 aa, Homo sapiens
GVALLLYAL

SEQ ID NO: 10287 - protein, 9 aa, Homo sapiens
GAQAAVGDL

SEQ ID NO: 10288 - protein, 9 aa, Homo sapiens
SGGGASFNL

SEQ ID NO: 10289 - protein, 9 aa, Homo sapiens
TQRSLSAEL

SEQ ID NO: 10290 - protein, 9 aa, Homo sapiens
VVYSQVWSM

SEQ ID NO: 10291 - protein, 9 aa, Homo sapiens
ASRPNPQEF

SEQ ID NO: 10292 - protein, 9 aa, Homo sapiens
QQPESSANI

SEQ ID NO: 10293 - protein, 9 aa, Homo sapiens
PVYVNVGSV

SEQ ID NO: 10294 - protein, 9 aa, Homo sapiens
GGASFNLSL

SEQ ID NO: 10295 - protein, 9 aa, Homo sapiens
LGFTGVALL

SEQ ID NO: 10296 - protein, 9 aa, Homo sapiens
RIPVSRPVL

SEQ ID NO: 10297 - protein, 9 aa, Homo sapiens
KVVNIPVRI

SEQ ID NO: 10298 - protein, 9 aa, Homo sapiens
SGGGASFNL

SEQ ID NO: 10299 - protein, 9 aa, Homo sapiens
MGKKTQRSL

SEQ ID NO: 10300 - protein, 9 aa, Homo sapiens
GGASFNLSL

SEQ ID NO: 10301 - protein, 9 aa, Homo sapiens
LGFTGVALL

SEQ ID NO: 10302 - protein, 9 aa, Homo sapiens
QQPESSANI

SEQ ID NO: 10303 - protein, 9 aa, Homo sapiens
NIPVRIPVS

SEQ ID NO: 10304 - protein, 9 aa, Homo sapiens
LGAQCSEAV

SEQ ID NO: 10305 - protein, 9 aa, Homo sapiens
FGVLGFTGV

SEQ ID NO: 10306 - protein, 9 aa, Homo sapiens
VGSVDVDVV

SEQ ID NO: 10307 - protein, 9 aa, Homo sapiens
WGLFGVLGF

SEQ ID NO: 10308 - protein, 9 aa, Homo sapiens
HVPIQSKVV

SEQ ID NO: 10309 - protein, 9 aa, Homo sapiens
RIPVSRPVL

SEQ ID NO: 10310 - protein, 9 aa, Homo sapiens
DGYRRDLMT

SEQ ID NO: 10311 - protein, 9 aa, Homo sapiens
RSPGAQAAV

SEQ ID NO: 10312 - protein, 9 aa, Homo sapiens
GSPPILYQF

SEQ ID NO: 10313 - protein, 9 aa, Homo sapiens
SGPDGYRRD

SEQ ID NO: 10314 - protein, 9 aa, Homo sapiens
GAQAAVGDL

SEQ ID NO: 10315 - protein, 9 aa, Homo sapiens
SRPNPQEFT

SEQ ID NO: 10316 - protein, 9 aa, Homo sapiens
SGNYSCEAN

SEQ ID NO: 10317 - protein, 9 aa, Homo sapiens
SPPILYQFY

SEQ ID NO: 10318 - protein, 9 aa, Homo sapiens
LLYALFHKI

SEQ ID NO: 10319 - protein, 9 aa, Homo sapiens
VLWGLFGVL

SEQ ID NO: 10320 - protein, 9 aa, Homo sapiens
DSQVIYSSV

SEQ ID NO: 10321 - protein, 9 aa, Homo sapiens
ELQPVYVNV

SEQ ID NO: 10322 - protein, 9 aa, Homo sapiens
VVYSQVWSM

SEQ ID NO: 10323 - protein, 9 aa, Homo sapiens
LGFTGVALL

SEQ ID NO: 10324 - protein, 9 aa, Homo sapiens
GAQAAVGDL

SEQ ID NO: 10325 - protein, 9 aa, Homo sapiens
DAGKYYCRA

SEQ ID NO: 10326 - protein, 9 aa, Homo sapiens
SPPILYQFY

SEQ ID NO: 10327 - protein, 9 aa, Homo sapiens
TYSSPTPDM

SEQ ID NO: 10328 - protein, 9 aa, Homo sapiens
SGGGASFNL

SEQ ID NO: 10329 - protein, 9 aa, Homo sapiens
YSCEANNGL

SEQ ID NO: 10330 - protein, 9 aa, Homo sapiens
GGGASFNLS

SEQ ID NO: 10331 - protein, 9 aa, Homo sapiens
FGVLGFTGV

SEQ ID NO: 10332 - protein, 9 aa, Homo sapiens
GGASFNLSL

SEQ ID NO: 10333 - protein, 9 aa, Homo sapiens
QQPESSANI

SEQ ID NO: 10334 - protein, 9 aa, Homo sapiens
AAVGDLLEL

SEQ ID NO: 10335 - protein, 9 aa, Homo sapiens
SPTPDMEEL

SEQ ID NO: 10336 - protein, 9 aa, Homo sapiens
AQAAVGDLL

SEQ ID NO: 10337 - protein, 9 aa, Homo sapiens
RDLMTAGVL

SEQ ID NO: 10338 - protein, 9 aa, Homo sapiens
QFYHEDVTL

SEQ ID NO: 10339 - protein, 9 aa, Homo sapiens
GFTGVALLL

SEQ ID NO: 10340 - protein, 9 aa, Homo sapiens
LYQFYHEDV

SEQ ID NO: 10341 - protein, 9 aa, Homo sapiens
TYSSPTPDM

SEQ ID NO: 10342 - protein, 9 aa, Homo sapiens
KVVNIPVRI

SEQ ID NO: 10343 - protein, 9 aa, Homo sapiens
AAVGDLLEL

SEQ ID NO: 10344 - protein, 9 aa, Homo sapiens
EALRGSPPI

SEQ ID NO: 10345 - protein, 9 aa, Homo sapiens
RSLSAELEI

SEQ ID NO: 10346 - protein, 9 aa, Homo sapiens
AQAAVGDLL

SEQ ID NO: 10347 - protein, 9 aa, Homo sapiens
SSANIRTLL

SEQ ID NO: 10348 - protein, 9 aa, Homo sapiens
QQPESSANI

SEQ ID NO: 10349 - protein, 9 aa, Homo sapiens
LLYALFHKI

SEQ ID NO: 10350 - protein, 9 aa, Homo sapiens
GYRRDLMTA

SEQ ID NO: 10351 - protein, 9 aa, Homo sapiens
CSEAVPVSI

SEQ ID NO: 10352 - protein, 9 aa, Homo sapiens
SPTPDMEEL

SEQ ID NO: 10353 - protein, 9 aa, Homo sapiens
ALRGSPPIL

SEQ ID NO: 10354 - protein, 9 aa, Homo sapiens
RADNGHVPI

SEQ ID NO: 10355 - protein, 9 aa, Homo sapiens
YSCEANNGL

SEQ ID NO: 10356 - protein, 9 aa, Homo sapiens
VLWGLFGVL

SEQ ID NO: 10357 - protein, 9 aa, Homo sapiens
ESSANIRTL

SEQ ID NO: 10358 - protein, 9 aa, Homo sapiens
LENKDSQVI

SEQ ID NO: 10359 - protein, 9 aa, Homo sapiens
MEELQPVYV

SEQ ID NO: 10360 - protein, 9 aa, Homo sapiens
AEHSGNYSC

SEQ ID NO: 10361 - protein, 9 aa, Homo sapiens
EELQPVYVN

SEQ ID NO: 10362 - protein, 9 aa, Homo sapiens
EALRGSPPI

SEQ ID NO: 10363 - protein, 9 aa, Homo sapiens
QEFTYSSPT

SEQ ID NO: 10364 - protein, 9 aa, Homo sapiens
SEAVPVSIS

SEQ ID NO: 10365 - protein, 9 aa, Homo sapiens
LLYALFHKI

SEQ ID NO: 10366 - protein, 9 aa, Homo sapiens
CEANNGLGA

SEQ ID NO: 10367 - protein, 9 aa, Homo sapiens
HEDVTLGNS

SEQ ID NO: 10368 - protein, 9 aa, Homo sapiens
CSEAVPVSI

SEQ ID NO: 10369 - protein, 9 aa, Homo sapiens
LEIPAVKES

SEQ ID NO: 10370 - protein, 9 aa, Homo sapiens
EDVTLGNSS

SEQ ID NO: 10371 - protein, 9 aa, Homo sapiens
RSLSAELEI

SEQ ID NO: 10372 - protein, 9 aa, Homo sapiens
RADNGHVPI

SEQ ID NO: 10373 - protein, 9 aa, Homo sapiens
QQPESSANI

SEQ ID NO: 10374 - protein, 9 aa, Homo sapiens
KVVNIPVRI

SEQ ID NO: 10375 - protein, 9 aa, Homo sapiens
KESDAGKYY

SEQ ID NO: 10376 - protein, 9 aa, Homo sapiens
VDVVYSQVW

SEQ ID NO: 10377 - protein, 9 aa, Homo sapiens
LELHCEALR

SEQ ID NO: 10378 - protein, 9 aa, Homo sapiens
LENKDSQVI

SEQ ID NO: 10379 - protein, 9 aa, Homo sapiens
MEELQPVYV

SEQ ID NO: 10380 - protein, 9 aa, Homo sapiens
AEHSGNYSC

SEQ ID NO: 10381 - protein, 9 aa, Homo sapiens
EELQPVYVN

SEQ ID NO: 10382 - protein, 9 aa, Homo sapiens
EALRGSPPI

SEQ ID NO: 10383 - protein, 9 aa, Homo sapiens
QEFTYSSPT

SEQ ID NO: 10384 - protein, 9 aa, Homo sapiens
SEAVPVSIS

SEQ ID NO: 10385 - protein, 9 aa, Homo sapiens
LLYALFHKI

SEQ ID NO: 10386 - protein, 9 aa, Homo sapiens
CEANNGLGA

SEQ ID NO: 10387 - protein, 9 aa, Homo sapiens
HEDVTLGNS

SEQ ID NO: 10388 - protein, 9 aa, Homo sapiens
CSEAVPVSI

SEQ ID NO: 10389 - protein, 9 aa, Homo sapiens
LEIPAVKES

SEQ ID NO: 10390 - protein, 9 aa, Homo sapiens
EDVTLGNSS

SEQ ID NO: 10391 - protein, 9 aa, Homo sapiens
RSLSAELEI

SEQ ID NO: 10392 - protein, 9 aa, Homo sapiens
RADNGHVPI

SEQ ID NO: 10393 - protein, 9 aa, Homo sapiens
QQPESSANI

SEQ ID NO: 10394 - protein, 9 aa, Homo sapiens
KVVNIPVRI

SEQ ID NO: 10395 - protein, 9 aa, Homo sapiens
KESDAGKYY

SEQ ID NO: 10396 - protein, 9 aa, Homo sapiens
VDVVYSQVW

SEQ ID NO: 10397 - protein, 9 aa, Homo sapiens
LELHCEALR

SEQ ID NO: 10398 - protein, 9 aa, Homo sapiens
APSGGGASF

SEQ ID NO: 10399 - protein, 9 aa, Homo sapiens
SPTPDMEEL

SEQ ID NO: 10400 - protein, 9 aa, Homo sapiens
GSPPILYQF

SEQ ID NO: 10401 - protein, 9 aa, Homo sapiens
SPPILYQFY

SEQ ID NO: 10402 - protein, 9 aa, Homo sapiens
RPNPQEFTY

SEQ ID NO: 10403 - protein, 9 aa, Homo sapiens
NPQEFTYSS

SEQ ID NO: 10404 - protein, 9 aa, Homo sapiens
GPDGYRRDL

SEQ ID NO: 10405 - protein, 9 aa, Homo sapiens
IPVSRPVLT

SEQ ID NO: 10406 - protein, 9 aa, Homo sapiens
VPIQSKVVN

SEQ ID NO: 10407 - protein, 8 aa, Homo sapiens
PVYVNVGS

SEQ ID NO: 10408 - protein, 9 aa, Homo sapiens
IPAVKESDA

SEQ ID NO: 10409 - protein, 9 aa, Homo sapiens
SSANIRTLL

SEQ ID NO: 10410 - protein, 9 aa, Homo sapiens
ESSANIRTL

SEQ ID NO: 10411 - protein, 9 aa, Homo sapiens
YSCEANNGL

SEQ ID NO: 10412 - protein, 9 aa, Homo sapiens
DSQVIYSSV

SEQ ID NO: 10413 - protein, 9 aa, Homo sapiens
RSPGAQAAV

SEQ ID NO: 10414 - protein, 9 aa, Homo sapiens
ASRPNPQEF

SEQ ID NO: 10415 - protein, 9 aa, Homo sapiens
WGLFGVLGF

SEQ ID NO: 10416 - protein, 9 aa, Homo sapiens
VSISGPDGY

SEQ ID NO: 10417 - protein, 9 aa, Homo sapiens
TAGVLWGLF

SEQ ID NO: 10418 - protein, 9 aa, Homo sapiens
SKVVNIPVR

SEQ ID NO: 10419 - protein, 9 aa, Homo sapiens
VKESDAGKY

SEQ ID NO: 10420 - protein, 9 aa, Homo sapiens
NKDSQVIYS

SEQ ID NO: 10421 - protein, 9 aa, Homo sapiens
KKTQRSLSA

SEQ ID NO: 10422 - protein, 9 aa, Homo sapiens
HKISGESSA

SEQ ID NO: 10423 - protein, 9 aa, Homo sapiens
GKYYCRADN

SEQ ID NO: 10424 - protein, 9 aa, Homo sapiens
GKKTQRSLS

SEQ ID NO: 10425 - protein, 9 aa, Homo sapiens
TNEPRGASR

SEQ ID NO: 10426 - protein, 9 aa, Homo sapiens
ESSATNEPR

SEQ ID NO: 10427 - protein, 9 aa, Homo sapiens
VSRPVLTLR

SEQ ID NO: 10428 - protein, 9 aa, Homo sapiens
SISGPDGYR

SEQ ID NO: 10429 - protein, 9 aa, Homo sapiens
IPVRIPVSR

SEQ ID NO: 10430 - protein, 9 aa, Homo sapiens
ISGPDGYRR

SEQ ID NO: 10431 - protein, 9 aa, Homo sapiens
QPESSANIR

SEQ ID NO: 10432 - protein, 9 aa, Homo sapiens
LLLYALFHK

SEQ ID NO: 10433 - protein, 9 aa, Homo sapiens
DMEELQPVY

SEQ ID NO: 10434 - protein, 9 aa, Homo sapiens
SQVIYSSVK

SEQ ID NO: 10435 - protein, 9 aa, Homo sapiens
VLWGLFGVL

SEQ ID NO: 10436 - protein, 9 aa, Homo sapiens
VLGFTGVAL

SEQ ID NO: 10437 - protein, 9 aa, Homo sapiens
LLELHCEAL

SEQ ID NO: 10438 - protein, 30 aa, Homo sapiens
MGKKTQRSLSAELEIPAVKESDAGKYYCRA

SEQ ID NO: 10439 - protein, 30 aa, Homo sapiens
PAVKESDAGKYYCRADNGHVPIQSKVVNIP

SEQ ID NO: 10440 - protein, 30 aa, Homo sapiens
DNGHVPIQSKVVNIPVRIPVSRPVLTLRSP

SEQ ID NO: 10441 - protein, 30 aa, Homo sapiens
VRIPVSRPVLTLRSPGAQAAVGDLLELHCE

SEQ ID NO: 10442 - protein, 30 aa, Homo sapiens
GAQAAVGDLLELHCEALRGSPPILYQFYHE

SEQ ID NO: 10443 - protein, 30 aa, Homo sapiens
ALRGSPPILYQFYHEDVTLGNSSAPSGGGA

SEQ ID NO: 10444 - protein, 30 aa, Homo sapiens
DVTLGNSSAPSGGGASFNLSLTAEHSGNYS

SEQ ID NO: 10445 - protein, 30 aa, Homo sapiens
SFNLSLTAEHSGNYSCEANNGLGAQCSEAV

SEQ ID NO: 10446 - protein, 30 aa, Homo sapiens
CEANNGLGAQCSEAVPVSISGPDGYRRDLM

SEQ ID NO: 10447 - protein, 30 aa, Homo sapiens
PVSISGPDGYRRDLMTAGVLWGLFGVLGFT

SEQ ID NO: 10448 - protein, 30 aa, Homo sapiens
TAGVLWGLFGVLGFTGVALLLYALFHKISG

SEQ ID NO: 10449 - protein, 30 aa, Homo sapiens
GVALLLYALFHKISGESSATNEPRGASRPN

SEQ ID NO: 10450 - protein, 30 aa, Homo sapiens
ESSATNEPRGASRPNPQEFTYSSPTPDMEE

SEQ ID NO: 10451 - protein, 30 aa, Homo sapiens
PQEFTYSSPTPDMEELQPVYVNVGSVDVDV

SEQ ID NO: 10452 - protein, 30 aa, Homo sapiens
LQPVYVNVGSVDVDVVYSQVWSMQQPESSA

SEQ ID NO: 10453 - protein, 30 aa, Homo sapiens
VYSQVWSMQQPESSANIRTLLENKDSQVIY

SEQ ID NO: 10454 - protein, 21 aa, Homo sapiens
NIRTLLENKDSQVIYSSVKKS

SEQ ID NO: 10455 - protein, 39 aa, Homo sapiens
KVVNIPVRIPVSRPVLTLRSPGAQAAVGDLLELHCEALR

SEQ ID NO: 10456 - protein, 24 aa, Homo sapiens
LGAQCSEAVPVSISGPDGYRRDLM

SEQ ID NO: 10457 - protein, 16 aa, Homo sapiens
ELQPVYVNVGSVDVDV

SEQ ID NO: 10458 - protein, 38 aa, Homo sapiens
GPDGYRRDLMTAGVLWGLFGVLGFTGVALLLYALFHKI

SEQ ID NO: 10459 - protein, 515 aa, Homo sapiens
MLLWASLLAFAPVCGQSAAAHKPVISVHPPWTTFFKGERVTLTCNGFQFYATEKTTWYHRHYWGEKLTLTPGNTLEVRESGLYRCQARGSPRSNPVRLLFSSDSLILQAPYSVFEGDTLVLRCHRRRKEKLTAVKYTWNGNILSISNKSWDLLIPQASSNNNGNYRCIGYGDENDVFRSNFKIIKIQELFPHPELKATDSQPTEGNSVNLSCETQLPPERSDTPLHFNFFRDGEVILSDWSTYPELQLPTVWRENSGSYWCGAETVRGNIHKHSPSLQIHVQRIPVSGVLLETQPSGGQAVEGEMLVLVCSVAEGTGDTTFSWHREDMQESLGRKTQRSLRAELELPAIRQSHAGGYYCTADNSYGPVQSMVLNVTVRETPGNRDGLVAAGATGGLLSALLLAVALLFHCWRRRKSGVGFLGDETRLPPAPGPGESSHSICPAQVELQSLYVDVHPKKGDLVYSEIQTTQLGEEEEANTSRTLLEDKDVSVVYSEVKTQHPDNSAGKISSKDEES

SEQ ID NO: 10460 - protein, 759 aa, Homo sapiens
MLLWVILLVLAPVSGQFARTPRPIIFLQPPWTTVFQGERVTLTCKGFRFYSPQKTKWYHRYLGKEILRETPDNILEVQESGEYRCQAQGSPLSSPVHLDFSSASLILQAPLSVFEGDSVVLRCRAKAEVTLNNTIYKNDNVLAFLNKRTDFHIPHACLKDNGAYRCTGYKESCCPVSSNTVKIQVQEPFTRPVLRASSFQPISGNPVTLTCETQLSLERSDVPLRFRFFRDDQTLGLGWSLSPNFQITAMWSKDSGFYWCKAATMPHSVISDSPRSWIQVQIPASHPVLTLSPEKALNFEGTKVTLHCETQEDSLRTLYRFYHEGVPLRHKSVRCERGASISFSLTTENSGNYYCTADNGLGAKPSKAVSLSVTVPVSHPVLNLSSPEDLIFEGAKVTLHCEAQRGSLPILYQFHHEDAALERRSANSAGGVAISFSLTAEHSGNYYCTADNGFGPQRSKAVSLSITVPVSHPVLTLSSAEALTFEGATVTLHCEVQRGSPQILYQFYHEDMPLWSSSTPSVGRVSFSFSLTEGHSGNYYCTADNGFGPQRSEVVSLFVTVPVSRPILTLRVPRAQAVVGDLLELHCEAPRGSPPILYWFYHEDVTLGSSSAPSGGEASFNLSLTAEHSGNYSCEANNGLVAQHSDTISLSVIVPVSRPILTFRAPRAQAVVGDLLELHCEALRGSSPILYWFYHEDVTLGKISAPSGGGASFNLSLTTEHSGIYSCEADNGLEAQRSEMVTLKVAGEWALPTSSTSEN

SEQ ID NO: 10461 - protein, 592 aa, Homo sapiens
MLLWVILLVLAPVSGQFARTPRPIIFLQPPWTTVFQGERVTLTCKGFRFYSPQKTKWYHRYLGKEILRETPDNILEVQESGEYRCQAQGSPLSSPVHLDFSSASLILQAPLSVFEGDSVVLRCRAKAEVTLNNTIYKNDNVLAFLNKRTDFHIPHACLKDNGAYRCTGYKESCCPVSSNTVKIQVQEPFTRPVLRASSFQPISGNPVTLTCETQLSLERSDVPLRFRFFRDDQTLGLGWSLSPNFQITAMWSKDSGFYWCKAATMPHSVISDSPRSWIQVQIPASHPVLTLSPEKALNFEGTKVTLHCETQEDSLRTLYRFYHEGVPLRHKSVRCERGASISFSLTTENSGNYYCTADNGLGAKPSKAVSLSVTVPVSHPVLNLSSPEDLIFEGAKVTLHCEAQRGSLPILYQFHHEDAALERRSANSAGGVAISFSLTAEHSGNYYCTADNGFGPQRSKAVSLSITVPVSHPVLTLSSAEALTFEGATVTLHCEVQRGSPQILYQFYHEDMPLWSSSTPSVGRVSFSFSLTEGHSGNYYCTADNGFGPQRSEVVSLFVTGKCWVLASHPPLAEFSLTHSFKNLFALSSFLP

SEQ ID NO: 10462 - protein, 977 aa, Homo sapiens
MLLWVILLVLAPVSGQFARTPRPIIFLQPPWTTVFQGERVTLTCKGFRFYSPQKTKWYHRYLGKEILRETPDNILEVQESGEYRCQAQGSPLSSPVHLDFSSASLILQAPLSVFEGDSVVLRCRAKAEVTLNNTIYKNDNVLAFLNKRTDFHIPHACLKDNGAYRCTGYKESCCPVSSNTVKIQVQEPFTRPVLRASSFQPISGNPVTLTCETQLSLERSDVPLRFRFFRDDQTLGLGWSLSPNFQITAMWSKDSGFYWCKAATMPHSVISDSPRSWIQVQIPASHPVLTLSPEKALNFEGTKVTLHCETQEDSLRTLYRFYHEGVPLRHKSVRCERGASISFSLTTENSGNYYCTADNGLGAKPSKAVSLSVTVPVSHPVLNLSSPEDLIFEGAKVTLHCEAQRGSLPILYQFHHEDAALERRSANSAGGVAISFSLTAEHSGNYYCTADNGFGPQRSKAVSLSITVPVSHPVLTLSSAEALTFEGATVTLHCEVQRGSPQILYQFYHEDMPLWSSSTPSVGRVSFSFSLTEGHSGNYYCTADNGFGPQRSEVVSLFVTVPVSRPILTLRVPRAQAVVGDLLELHCEAPRGSPPILYWFYHEDVTLGSSSAPSGGEASFNLSLTAEHSGNYSCEANNGLVAQHSDTISLSVIVPVSRPILTFRAPRAQAVVGDLLELHCEALRGSSPILYWFYHEDVTLGKISAPSGGGASFNLSLTTEHSGIYSCEADNGLEAQRSEMVTLKVAVPVSRPVLTLRAPGTHAAVGDLLELHCEALRGSPLILYRFFHEDVTLGNRSSPSGGASLNLSLTAEHSGNYSCEADNGLGAQRSETVTLYITGLTANRSGPFATGVAGGLLSIAGLAAGALLLYCWLSRKAGRKPASDPARSPSDSDSQEPTYHNVPAWEELQPVYTNANPRGENVVYSEVRIIQEKKKHAVASDPRHLRNKGSPIIYSEVKVASTPVSGSLFLASSAPHR

SEQ ID NO: 10463 - protein, 734 aa, Homo sapiens
MLLWLLLLILTPGREQSGVAPKAVLLLNPPWSTAFKGEKVALICSSISHSLAQGDTYWYHDEKLLKIKHDKIQITEPGNYQCKTRGSSLSDAVHVEFSPDWLILQALHPVFEGDNVILRCQGKDNKNTHQKVYYKDGKQLPNSYNLEKITVNSVSRDNSKYHCTAYRKFYILDIEVTSKPLNIQVQELFLHPVLRASSSTPIEGSPMTLTCETQLSPQRPDVQLQFSLFRDSQTLGLGWSRSPRLQIPAMWTEDSGSYWCEVETVTHSIKKRSLRSQIRVQRVPVSNVNLEIRPTGGQLIEGENMVLICSVAQGSGTVTFSWHKEGRVRSLGRKTQRSLLAELHVLTVKESDAGRYYCAADNVHSPILSTWIRVTVRIPVSHPVLTFRAPRAHTVVGDLLELHCESLRGSPPILYRFYHEDVTLGNSSAPSGGGASFNLSLTAEHSGNYSCDADNGLGAQHSHGVSLRVTVPVSRPVLTLRAPGAQAVVGDLLELHCESLRGSFPILYWFYHEDDTLGNISAHSGGGASFNLSLTTEHSGNYSCEADNGLGAQHSKVVTLNVTGTSRNRTGLTAAGITGLVLSILVLAAAAALLHYARARRKPGGLSATGTSSHSPSECQEPSSSRPSRIDPQEPTHSKPLAPMELEPMYSNVNPGDSNPIYSQIWSIQHTKENSANCPMMHQEHEELTVLYSELKKTHPDDSAGEASSRGRAHEEDDEENYENVPRVLLASDH

SEQ ID NO: 10464 - protein, 508 aa, Homo sapiens
MLLWSLLVIFDAVTEQADSLTLVAPSSVFEGDSIVLKCQGEQNWKIQKMAYHKDNKELSVFKKFSDFLIQSAVLSDSGNYFCSTKGQLFLWDKTSNIVKIKVQELFQRPVLTASSFQPIEGGPVSLKCETRLSPQRLDVQLQFCFFRENQVLGSGWSSSPELQISAVWSEDTGSYWCKAETVTHRIRKQSLQSQIHVQRIPISNVSLEIRAPGGQVTEGQKLILLCSVAGGTGNVTFSWYREATGTSMGKKTQRSLSAELEIPAVKESDAGKYYCRADNGHVPIQSKVVNIPVRIPVSRPVLTLRSPGAQAAVGDLLELHCEALRGSPPILYQFYHEDVTLGNSSAPSGGGASFNLSLTAEHSGNYSCEANNGLGAQCSEAVPVSISGPDGYRRDLMTAGVLWGLFGVLGFTGVALLLYALFHKISGESSATNEPRGASRPNPQEFTYSSPTPDMEELQPVYVNVGSVDVDVVYSQVWSMQQPESSANIRTLLENKDSQVIYSSVKKS

SEQ ID NO: 10465 - protein, 429 aa, Homo sapiens
MLPRLLLLICAPLCEPAELFLIASPSHPTEGSPVTLTCKMPFLQSSDAQFQFCFFRDTRALGPGWSSSPKLQIAAMWKEDTGSYWCEAQTMASKVLRSRRSQINVHRVPVADVSLETQPPGGQVMEGDRLVLICSVAMGTGDITFLWYKGAVGLNLQSKTQRSLTAEYEIPSVRESDAEQYYCVAENGYGPSPSGLVSITVRIPVSRPILMLRAPRAQAAVEDVLELHCEALRGSPPILYWFYHEDITLGSRSAPSGGGASFNLSLTEEHSGNYSCEANNGLGAQRSEAVTLNFTVPTGARSNHLTSGVIEGLLSTLGPATVALLFCYGLKRKIGRRSARDPLRSLPSPLPQEFTYLNSPTPGQLQPIYENVNVVSGDEVYSLAYYNQPEQESVAAETLGTHMEDKVSLDIYSRLRKANITDVDYEDAM

SEQ ID NO: 10466 - protein, 266 aa, Homo sapiens
  variant (1)...(266): Xaa = Any amino acid
DNVHSPILSTWIRVTVRIPVSHPVLTFRAPRAHTVVGDLLELHCESLRGSPPILYRFYHEDVTLGNSSAPSGGGASFNLSLTAEHSGNYSCDADNGLGAQHSHGVSLRVTVPVSRPVLTLRAPGAQAVVGDPLELHCESLRGSFPILYWFYHEDDTLGNISAHSGGGASFNLSLTTEHSGNYSCEADNGLGAQHSKVVTLNVTGTSRNRTGLTXAGITGLVXXIXVLXAAAALLHYARARRKPGGLSATGTSSHSPSECQEPSSSR

SEQ ID NO: 10467-10978 - skipped (512 entries)

SEQ ID NO: 10979 - DNA, 17 bp, Homo sapiens
gacactcaacttcacag

SEQ ID NO: 10980 - DNA, 117 bp, Homo sapiens
  misc_feature (68)...(68): n = g, a, c or t
tgcctactggggccagaagcaatcatcttacctcaggagtcattgaggggctgctcagcacccttggnccagccaccgtggccttattattttgctacggcctcaaaagaaaaatag

SEQ ID NO: 10981 - DNA, 28 bp, Homo sapiens
gaagacgttcagccagggatccactcag

SEQ ID NO: 10982 - DNA, 83 bp, Homo sapiens
gagccttcccagccctctaccccaagagttcacctacctcaactcacctaccccagggcagctacagcctatatatgaaaatg

SEQ ID NO: 10983 - DNA, 72 bp, Homo sapiens
tgaatgttgtaagtggggatgaggtttattcactggcgtactataaccagccggagcaggaatcagtagcag

SEQ ID NO: 10984 - DNA, 32 bp, Homo sapiens
cagaaaccctggggacacatatggaggacaag

SEQ ID NO: 10985 - DNA, 78 bp, Homo sapiens
tggtgaccaagagtacatctcttttcaaatagctggattaggtcctcatgctgctgtggtcattgctggtcatctttg

SEQ ID NO: 10986 - DNA, 21 bp, Homo sapiens
atgcagtcactgaacaggcag

SEQ ID NO: 10987 - DNA, 258 bp, Homo sapiens
attcgctgacccttgtggcgccctcttctgtcttcgaaggagacagcatcgttctgaaatgccagggagaacagaactggaaaattcagaagatggcttaccataaggataacaaagagttatctgttttcaaaaaattctcagatttccttatccaaagtgcagttttaagtgacagtggtaactatttctgtagtaccaaaggacaactctttctctgggataaaacttcaaatatagtaaagataaaagtccaag

SEQ ID NO: 10988 - DNA, 285 bp, Homo sapiens
agctctttcaacgtcctgtgctgactgccagctccttccagcccatcgaagggggtccagtgagcctgaaatgtgagacccggctctctccacagaggttggatgttcaactccagttctgcttcttcagagaaaaccaggtcctggggtcaggctggagcagctctccggagctccagatttctgccgtgtggagtgaagacacagggtcttactggtgcaaggcagaaacggtgactcacaggatcagaaaacagagcctccaatcccagattcacgtgcaga

SEQ ID NO: 10989 - DNA, 97 bp, Homo sapiens
agctctttcaacgtcctgtgctgactgccagctccttccagcccatcgaagggggtccagtgagcctgaaatgtgagacccggctctctccacagag

SEQ ID NO: 10990 - DNA, 288 bp, Homo sapiens
gaatccccatctctaatgtaagcttggagatccgggcccccgggggacaggtgactgaaggacaaaaactgatcctgctctgctcagtggctgggggtacaggaaatgtcacattctcctggtacagagaggccacaggaaccagtatgggaaagaaaacccagcgttccctgtcagcagagctggagatcccagctgtgaaagagagtgatgccggcaaatattactgtagagctgacaacggccatgtgcctatccagagcaaggtggtgaatatccctgtgagaa

SEQ ID NO: 10991 - DNA, 706 bp, Homo sapiens
ccacgcgtccggtcctgaactgggctgaataaacatacctaaatatatgtttagaaatgctcctatgtatcagttttcccaggaacaactataatattatagaaatcttaaaattatttcctaataaaaaattataggatacaaaagaaaaaaaagaaatatgaagagggctggatgggcacaggaaaacaatcagatgagaacaacagatgaccgtgtctgcaggcagcacccagaactgatattcccctcaaacgtctaaatatattgttgagaaaattatctctaactgttctagtgggaatgtgggaatggaaaatatgcaacagccatggggccaggccctttgctgagcctgcaggttgggagtttgtgaatctattgaggcatcacaaatcttttctgatagcccctctgtgtctgtcagttccagtgtctcgccctgtcctcaccctcaggtctcctggggcccaggctgcagtgggggacctgctggagcttcactgtgaggccctgagaggctctcccccaatcttgtaccaattttatcatgaggatgtcacccttgggaacagctcggccccctctggaggaggggcctccttcaacctctctttgactgcagaacattctggaaactactcctgtgaggccaacaacggcctgggggcccagtgcagtgaggcagtgccagtctccatctcag

SEQ ID NO: 10992 - DNA, 279 bp, Homo sapiens
ttccagtgtctcgccctgtcctcaccctcaggtctcctggggcccaggctgcagtgggggacctgctggagcttcactgtgaggccctgagaggctctcccccaatcttgtaccaattttatcatgaggatgtcacccttgggaacagctcggccccctctggaggaggggcctccttcaacctctctttgactgcagaacattctggaaactactcctgtgaggccaacaacggcctgggggcccagtgcagtgaggcagtgccagtctccatctcag

SEQ ID NO: 10993 - DNA, 395 bp, Homo sapiens
gacctgatggctatagaagagacctcatgacagctggagttctctggggactgtttggtgtccttggtttcactggtgttgctttgctgttgtatgccttgttccacaagatatcaggttgtatctaccatttggattctccatattttgctatgacctttccactactgatatagattgaaattacaaaaaaagaagagagaaaagaaaactctccaaaagccaataatttctttttatgcttcataattctgcaaggctctgtgcaatgctcaatgtggtcatactgctaattatacaatatgtcactgttccctgtgcatagtcactggagattaaattatttacacattctttcaaaaaaaaaaaaaaaaaaaaaaaaaaaaaaaaaaaaa

SEQ ID NO: 10994 - DNA, 117 bp, Homo sapiens
gacctgatggctatagaagagacctcatgacagctggagttctctggggactgtttggtgtccttggtttcactggtgttgctttgctgttgtatgccttgttccacaagatatcag

SEQ ID NO: 10995 - DNA, 28 bp, Homo sapiens
gagaaagttctgccactaatgaacccag

SEQ ID NO: 10996 - DNA, 86 bp, Homo sapiens
aggggcttccaggccaaatcctcaagagttcacctattcaagcccaaccccagacatggaggagctgcagccagtgtatgtcaatg

SEQ ID NO: 10997 - DNA, 66 bp, Homo sapiens
tgggctctgtagatgtggatgtggtttattctcaggtctggagcatgcagcagccagaaagctcag

SEQ ID NO: 10998 - DNA, 29 bp, Homo sapiens
caaacatcaggacacttctggagaacaag

SEQ ID NO: 10999 - DNA, 1045 bp, Homo sapiens
gactcccaagtcatctactcttctgtgaagaaatcataacacttggaggaatcagaagggaagatcaacagcaaggatggggcatcattaagacttgctataaaaccttatgaaaatgcttgaggcttatcacctgccacagccagaacgtgcctcaggaggcacctcctgtcatttttgtcctgatgatgtttcttctccaatatcttcttttacctatcaatattcattgaactgctgctacatccagacactgtgcaaataaattatttctgctaccttctcttaagcaatcagtgtgtaaagatttgagggaagaatgaataagagatacaaggtctcaccttcatctactgtgaagtgatgagaacaggacttgatagtggtgtattaacttatttatgtgctgctggatacagtttgctaatattttgttgagaatttttgcaaatatgttcattgggaatattggcctgaaattttcttttccactgtgtctctgccagaatgtttgtatcaggctgatgctggcttcatagaatgagttaggcaggagcccttcctccttgattttttggcatagtttcagcaggattggtaccagttattctttctgcatcttgtagaattcagctatgaatccatctggtctagggcttttgtgttggttggtaagttttttattactaattcaacttcagcgcttgatattggtctaggaggggtttctgtctcttcctggttcaatcttgggagattgtgtgtttccaggaatttagccgtttcctccagattttcttctttatgtgcatcgacttgagtgtaaacataacttatatgcactgggaaaccaaaaaatctgtgtgacttgctttattgcagcatttgttttattttggtagtctggaactgaacctgcaatatcaccaaagtatgcatatagttgcaaaaatgtgatttttgacatagtaaatatgagtatttgcaataaactatgatattacttttgtaagtatatagaataaaatgtaaataatctataaaa

SEQ ID NO: 11000 - DNA, 2580 bp, Homo sapiens; identical to SEQ ID NO: 9609

SEQ ID NO: 11001 - DNA, 1524 bp, Homo sapiens
atgctgctgtggtcattgctggtcatctttgatgcagtcactgaacaggcagattcgctgacccttgtggcgccctcttctgtcttcgaaggagacagcatcgttctgaaatgccagggagaacagaactggaaaattcagaagatggcttaccataaggataacaaagagttatctgttttcaaaaaattctcagatttccttatccaaagtgcagttttaagtgacagtggtaactatttctgtagtaccaaaggacaactctttctctgggataaaacttcaaatatagtaaagataaaagtccaagagctctttcaacgtcctgtgctgactgccagctccttccagcccatcgaagggggtccagtgagcctgaaatgtgagacccggctctctccacagaggttggatgttcaactccagttctgcttcttcagagaaaaccaggtcctggggtcaggctggagcagctctccggagctccagatttctgccgtgtggagtgaagacacagggtcttactggtgcaaggcagaaacggtgactcacaggatcagaaaacagagcctccaatcccagattcacgtgcagagaatccccatctctaatgtaagcttggagatccgggcccccgggggacaggtgactgaaggacaaaaactgatcctgctctgctcagtggctgggggtacaggaaatgtcacattctcctggtacagagaggccacaggaaccagtatgggaaagaaaacccagcgttccctgtcagcagagctggagatcccagctgtgaaagagagtgatgccggcaaatattactgtagagctgacaacggccatgtgcctatccagagcaaggtggtgaatatccctgtgagaattccagtgtctcgccctgtcctcaccctcaggtctcctggggcccaggctgcagtgggggacctgctggagcttcactgtgaggccctgagaggctctcccccaatcttgtaccaattttatcatgaggatgtcacccttgggaacagctcggccccctctggaggaggggcctccttcaacctctctttgactgcagaacattctggaaactactcctgtgaggccaacaacggcctgggggcccagtgcagtgaggcagtgccagtctccatctcaggacctgatggctatagaagagacctcatgacagctggagttctctggggactgtttggtgtccttggtttcactggtgttgctttgctgttgtatgccttgttccacaagatatcaggagaaagttctgccactaatgaacccagaggggcttccaggccaaatcctcaagagttcacctattcaagcccaaccccagacatggaggagctgcagccagtgtatgtcaatgtgggctctgtagatgtggatgtggtttattctcaggtctggagcatgcagcagccagaaagctcagcaaacatcaggacacttctggagaacaaggactcccaagtcatctactcttctgtgaagaaatca

SEQ ID NO: 11002 - DNA, 2295 bp, Homo sapiens
tggtgaccaagagtacatctcttttcaaatagctggattaggtcctcatgctgctgtggtcattgctggtcatctttgatgcagtcactgaacaggcagattcgctgacccttgtggcgccctcttctgtcttcgaaggagacagcatcgttctgaaatgccagggagaacagaactggaaaattcagaagatggcttaccataaggataacaaagagttatctgttttcaaaaaattctcagatttccttatccaaagtgcagttttaagtgacagtggtaactatttctgtagtaccaaaggacaactctttctctgggataaaacttcaaatatagtaaagataaaagtccaaggaatccccatctctaatgtaagcttggagatccgggcccccgggggacaggtgactgaaggacaaaaactgatcctgctctgctcagtggctgggggtacaggaaatgtcacattctcctggtacagagaggccacaggaaccagtatgggaaagaaaacccagcgttccctgtcagcagagctggagatcccagctgtgaaagagagtgatgccggcaaatattactgtagagctgacaacggccatgtgcctatccagagcaaggtggtgaatatccctgtgagaattccagtgtctcgccctgtcctcaccctcaggtctcctggggcccaggctgcagtgggggacctgctggagcttcactgtgaggccctgagaggctctcccccaatcttgtaccaattttatcatgaggatgtcacccttgggaacagctcggccccctctggaggaggggcctccttcaacctctctttgactgcagaacattctggaaactactcctgtgaggccaacaacggcctgggggcccagtgcagtgaggcagtgccagtctccatctcaggacctgatggctatagaagagacctcatgacagctggagttctctggggactgtttggtgtccttggtttcactggtgttgctttgctgttgtatgccttgttccacaagatatcaggagaaagttctgccactaatgaacccagaggggcttccaggccaaatcctcaagagttcacctattcaagcccaaccccagacatggaggagctgcagccagtgtatgtcaatgtgggctctgtagatgtggatgtggtttattctcaggtctggagcatgcagcagccagaaagctcagcaaacatcaggacacttctggagaacaaggactcccaagtcatctactcttctgtgaagaaatcataacacttggaggaatcagaagggaagatcaacagcaaggatggggcatcattaagacttgctataaaaccttatgaaaatgcttgaggcttatcacctgccacagccagaacgtgcctcaggaggcacctcctgtcatttttgtcctgatgatgtttcttctccaatatcttcttttacctatcaatattcattgaactgctgctacatccagacactgtgcaaataaattatttctgctaccttctcttaagcaatcagtgtgtaaagatttgagggaagaatgaataagagatacaaggtctcaccttcatctactgtgaagtgatgagaacaggacttgatagtggtgtattaacttatttatgtgctgctggatacagtttgctaatattttgttgagaatttttgcaaatatgttcattgggaatattggcctgaaattttcttttccactgtgtctctgccagaatgtttgtatcaggctgatgctggcttcatagaatgagttaggcaggagcccttcctccttgattttttggcatagtttcagcaggattggtaccagttattctttctgcatcttgtagaattcagctatgaatccatctggtctagggcttttgtgttggttggtaagttttttattactaattcaacttcagcgcttgatattggtctaggaggggtttctgtctcttcctggttcaatcttgggagattgtgtgtttccaggaatttagccgtttcctccagattttcttctttatgtgcatcgacttgagtgtaaacataacttatatgcactgggaaaccaaaaaatctgtgtgacttgctttattgcagcatttgttttattttggtagtctggaactgaacctgcaatatcaccaaagtatgcatatagttgcaaaaatgtgatttttgacatagtaaatatgagtatttgcaataaactatgatattacttttgtaagtatatagaataaaatgtaaataatctataaaa

SEQ ID NO: 11003 - DNA, 1239 bp, Homo sapiens
atgctgctgtggtcattgctggtcatctttgatgcagtcactgaacaggcagattcgctgacccttgtggcgccctcttctgtcttcgaaggagacagcatcgttctgaaatgccagggagaacagaactggaaaattcagaagatggcttaccataaggataacaaagagttatctgttttcaaaaaattctcagatttccttatccaaagtgcagttttaagtgacagtggtaactatttctgtagtaccaaaggacaactctttctctgggataaaacttcaaatatagtaaagataaaagtccaaggaatccccatctctaatgtaagcttggagatccgggcccccgggggacaggtgactgaaggacaaaaactgatcctgctctgctcagtggctgggggtacaggaaatgtcacattctcctggtacagagaggccacaggaaccagtatgggaaagaaaacccagcgttccctgtcagcagagctggagatcccagctgtgaaagagagtgatgccggcaaatattactgtagagctgacaacggccatgtgcctatccagagcaaggtggtgaatatccctgtgagaattccagtgtctcgccctgtcctcaccctcaggtctcctggggcccaggctgcagtgggggacctgctggagcttcactgtgaggccctgagaggctctcccccaatcttgtaccaattttatcatgaggatgtcacccttgggaacagctcggccccctctggaggaggggcctccttcaacctctctttgactgcagaacattctggaaactactcctgtgaggccaacaacggcctgggggcccagtgcagtgaggcagtgccagtctccatctcaggacctgatggctatagaagagacctcatgacagctggagttctctggggactgtttggtgtccttggtttcactggtgttgctttgctgttgtatgccttgttccacaagatatcaggagaaagttctgccactaatgaacccagaggggcttccaggccaaatcctcaagagttcacctattcaagcccaaccccagacatggaggagctgcagccagtgtatgtcaatgtgggctctgtagatgtggatgtggtttattctcaggtctggagcatgcagcagccagaaagctcagcaaacatcaggacacttctggagaacaaggactcccaagtcatctactcttctgtgaagaaatca

SEQ ID NO: 11004 - DNA, 2301 bp, Homo sapiens
tggtgaccaagagtacatctcttttcaaatagctggattaggtcctcatgctgctgtggtcattgctggtcatctttgatgcagtcactgaacaggcagattcgctgacccttgtggcgccctcttctgtcttcgaaggagacagcatcgttctgaaatgccagggagaacagaactggaaaattcagaagatggcttaccataaggataacaaagagttatctgttttcaaaaaattctcagatttccttatccaaagtgcagttttaagtgacagtggtaactatttctgtagtaccaaaggacaactctttctctgggataaaacttcaaatatagtaaagataaaagtccaagagctctttcaacgtcctgtgctgactgccagctccttccagcccatcgaagggggtccagtgagcctgaaatgtgagacccggctctctccacagaggttggatgttcaactccagttctgcttcttcagagaaaaccaggtcctggggtcaggctggagcagctctccggagctccagatttctgccgtgtggagtgaagacacagggtcttactggtgcaaggcagaaacggtgactcacaggatcagaaaacagagcctccaatcccagattcacgtgcagagaatccccatctctaatgtaagcttggagatccgggcccccgggggacaggtgactgaaggacaaaaactgatcctgctctgctcagtggctgggggtacaggaaatgtcacattctcctggtacagagaggccacaggaaccagtatgggaaagaaaacccagcgttccctgtcagcagagctggagatcccagctgtgaaagagagtgatgccggcaaatattactgtagagctgacaacggccatgtgcctatccagagcaaggtggtgaatatccctgtgagaagacctgatggctatagaagagacctcatgacagctggagttctctggggactgtttggtgtccttggtttcactggtgttgctttgctgttgtatgccttgttccacaagatatcaggagaaagttctgccactaatgaacccagaggggcttccaggccaaatcctcaagagttcacctattcaagcccaaccccagacatggaggagctgcagccagtgtatgtcaatgtgggctctgtagatgtggatgtggtttattctcaggtctggagcatgcagcagccagaaagctcagcaaacatcaggacacttctggagaacaaggactcccaagtcatctactcttctgtgaagaaatcataacacttggaggaatcagaagggaagatcaacagcaaggatggggcatcattaagacttgctataaaaccttatgaaaatgcttgaggcttatcacctgccacagccagaacgtgcctcaggaggcacctcctgtcatttttgtcctgatgatgtttcttctccaatatcttcttttacctatcaatattcattgaactgctgctacatccagacactgtgcaaataaattatttctgctaccttctcttaagcaatcagtgtgtaaagatttgagggaagaatgaataagagatacaaggtctcaccttcatctactgtgaagtgatgagaacaggacttgatagtggtgtattaacttatttatgtgctgctggatacagtttgctaatattttgttgagaatttttgcaaatatgttcattgggaatattggcctgaaattttcttttccactgtgtctctgccagaatgtttgtatcaggctgatgctggcttcatagaatgagttaggcaggagcccttcctccttgattttttggcatagtttcagcaggattggtaccagttattctttctgcatcttgtagaattcagctatgaatccatctggtctagggcttttgtgttggttggtaagttttttattactaattcaacttcagcgcttgatattggtctaggaggggtttctgtctcttcctggttcaatcttgggagattgtgtgtttccaggaatttagccgtttcctccagattttcttctttatgtgcatcgacttgagtgtaaacataacttatatgcactgggaaaccaaaaaatctgtgtgacttgctttattgcagcatttgttttattttggtagtctggaactgaacctgcaatatcaccaaagtatgcatatagttgcaaaaatgtgatttttgacatagtaaatatgagtatttgcaataaactatgatattacttttgtaagtatatagaataaaatgtaaataatctataaaa

SEQ ID NO: 11005 - DNA, 1245 bp, Homo sapiens
atgctgctgtggtcattgctggtcatctttgatgcagtcactgaacaggcagattcgctgacccttgtggcgccctcttctgtcttcgaaggagacagcatcgttctgaaatgccagggagaacagaactggaaaattcagaagatggcttaccataaggataacaaagagttatctgttttcaaaaaattctcagatttccttatccaaagtgcagttttaagtgacagtggtaactatttctgtagtaccaaaggacaactctttctctgggataaaacttcaaatatagtaaagataaaagtccaagagctctttcaacgtcctgtgctgactgccagctccttccagcccatcgaagggggtccagtgagcctgaaatgtgagacccggctctctccacagaggttggatgttcaactccagttctgcttcttcagagaaaaccaggtcctggggtcaggctggagcagctctccggagctccagatttctgccgtgtggagtgaagacacagggtcttactggtgcaaggcagaaacggtgactcacaggatcagaaaacagagcctccaatcccagattcacgtgcagagaatccccatctctaatgtaagcttggagatccgggcccccgggggacaggtgactgaaggacaaaaactgatcctgctctgctcagtggctgggggtacaggaaatgtcacattctcctggtacagagaggccacaggaaccagtatgggaaagaaaacccagcgttccctgtcagcagagctggagatcccagctgtgaaagagagtgatgccggcaaatattactgtagagctgacaacggccatgtgcctatccagagcaaggtggtgaatatccctgtgagaagacctgatggctatagaagagacctcatgacagctggagttctctggggactgtttggtgtccttggtttcactggtgttgctttgctgttgtatgccttgttccacaagatatcaggagaaagttctgccactaatgaacccagaggggcttccaggccaaatcctcaagagttcacctattcaagcccaaccccagacatggaggagctgcagccagtgtatgtcaatgtgggctctgtagatgtggatgtggtttattctcaggtctggagcatgcagcagccagaaagctcagcaaacatcaggacacttctggagaacaaggactcccaagtcatctactcttctgtgaagaaatca

SEQ ID NO: 11006 - DNA, 2016 bp, Homo sapiens
tggtgaccaagagtacatctcttttcaaatagctggattaggtcctcatgctgctgtggtcattgctggtcatctttgatgcagtcactgaacaggcagattcgctgacccttgtggcgccctcttctgtcttcgaaggagacagcatcgttctgaaatgccagggagaacagaactggaaaattcagaagatggcttaccataaggataacaaagagttatctgttttcaaaaaattctcagatttccttatccaaagtgcagttttaagtgacagtggtaactatttctgtagtaccaaaggacaactctttctctgggataaaacttcaaatatagtaaagataaaagtccaaggaatccccatctctaatgtaagcttggagatccgggcccccgggggacaggtgactgaaggacaaaaactgatcctgctctgctcagtggctgggggtacaggaaatgtcacattctcctggtacagagaggccacaggaaccagtatgggaaagaaaacccagcgttccctgtcagcagagctggagatcccagctgtgaaagagagtgatgccggcaaatattactgtagagctgacaacggccatgtgcctatccagagcaaggtggtgaatatccctgtgagaagacctgatggctatagaagagacctcatgacagctggagttctctggggactgtttggtgtccttggtttcactggtgttgctttgctgttgtatgccttgttccacaagatatcaggagaaagttctgccactaatgaacccagaggggcttccaggccaaatcctcaagagttcacctattcaagcccaaccccagacatggaggagctgcagccagtgtatgtcaatgtgggctctgtagatgtggatgtggtttattctcaggtctggagcatgcagcagccagaaagctcagcaaacatcaggacacttctggagaacaaggactcccaagtcatctactcttctgtgaagaaatcataacacttggaggaatcagaagggaagatcaacagcaaggatggggcatcattaagacttgctataaaaccttatgaaaatgcttgaggcttatcacctgccacagccagaacgtgcctcaggaggcacctcctgtcatttttgtcctgatgatgtttcttctccaatatcttcttttacctatcaatattcattgaactgctgctacatccagacactgtgcaaataaattatttctgctaccttctcttaagcaatcagtgtgtaaagatttgagggaagaatgaataagagatacaaggtctcaccttcatctactgtgaagtgatgagaacaggacttgatagtggtgtattaacttatttatgtgctgctggatacagtttgctaatattttgttgagaatttttgcaaatatgttcattgggaatattggcctgaaattttcttttccactgtgtctctgccagaatgtttgtatcaggctgatgctggcttcatagaatgagttaggcaggagcccttcctccttgattttttggcatagtttcagcaggattggtaccagttattctttctgcatcttgtagaattcagctatgaatccatctggtctagggcttttgtgttggttggtaagttttttattactaattcaacttcagcgcttgatattggtctaggaggggtttctgtctcttcctggttcaatcttgggagattgtgtgtttccaggaatttagccgtttcctccagattttcttctttatgtgcatcgacttgagtgtaaacataacttatatgcactgggaaaccaaaaaatctgtgtgacttgctttattgcagcatttgttttattttggtagtctggaactgaacctgcaatatcaccaaagtatgcatatagttgcaaaaatgtgatttttgacatagtaaatatgagtatttgcaataaactatgatattacttttgtaagtatatagaataaaatgtaaataatctataaaa

SEQ ID NO: 11007 - DNA, 960 bp, Homo sapiens
atgctgctgtggtcattgctggtcatctttgatgcagtcactgaacaggcagattcgctgacccttgtggcgccctcttctgtcttcgaaggagacagcatcgttctgaaatgccagggagaacagaactggaaaattcagaagatggcttaccataaggataacaaagagttatctgttttcaaaaaattctcagatttccttatccaaagtgcagttttaagtgacagtggtaactatttctgtagtaccaaaggacaactctttctctgggataaaacttcaaatatagtaaagataaaagtccaaggaatccccatctctaatgtaagcttggagatccgggcccccgggggacaggtgactgaaggacaaaaactgatcctgctctgctcagtggctgggggtacaggaaatgtcacattctcctggtacagagaggccacaggaaccagtatgggaaagaaaacccagcgttccctgtcagcagagctggagatcccagctgtgaaagagagtgatgccggcaaatattactgtagagctgacaacggccatgtgcctatccagagcaaggtggtgaatatccctgtgagaagacctgatggctatagaagagacctcatgacagctggagttctctggggactgtttggtgtccttggtttcactggtgttgctttgctgttgtatgccttgttccacaagatatcaggagaaagttctgccactaatgaacccagaggggcttccaggccaaatcctcaagagttcacctattcaagcccaaccccagacatggaggagctgcagccagtgtatgtcaatgtgggctctgtagatgtggatgtggtttattctcaggtctggagcatgcagcagccagaaagctcagcaaacatcaggacacttctggagaacaaggactcccaagtcatctactcttctgtgaagaaatca

SEQ ID NO: 11008 - DNA, 1604 bp, Homo sapiens
tggtgaccaagagtacatctcttttcaaatagctggattaggtcctcatgctgctgtggtcattgctggtcatctttgatgcagtcactgaacaggcagattcgctgacccttgtggcgccctcttctgtcttcgaaggagacagcatcgttctgaaatgccagggagaacagaactggaaaattcagaagatggcttaccataaggataacaaagagttatctgttttcaaaaaattctcagatttccttatccaaagtgcagttttaagtgacagtggtaactatttctgtagtaccaaaggacaactctttctctgggataaaacttcaaatatagtaaagataaaagtccaagagctctttcaacgtcctgtgctgactgccagctccttccagcccatcgaagggggtccagtgagcctgaaatgtgagacccggctctctccacagaggttggatgttcaactccagttctgcttcttcagagaaaaccaggtcctggggtcaggctggagcagctctccggagctccagatttctgccgtgtggagtgaagacacagggtcttactggtgcaaggcagaaacggtgactcacaggatcagaaaacagagcctccaatcccagattcacgtgcagagaatccccatctctaatgtaagcttggagatccgggcccccgggggacaggtgactgaaggacaaaaactgatcctgctctgctcagtggctgggggtacaggaaatgtcacattctcctggtacagagaggccacaggaaccagtatgggaaagaaaacccagcgttccctgtcagcagagctggagatcccagctgtgaaagagagtgatgccggcaaatattactgtagagctgacaacggccatgtgcctatccagagcaaggtggtgaatatccctgtgagaattccagtgtctcgccctgtcctcaccctcaggtctcctggggcccaggctgcagtgggggacctgctggagcttcactgtgaggccctgagaggctctcccccaatcttgtaccaattttatcatgaggatgtcacccttgggaacagctcggccccctctggaggaggggcctccttcaacctctctttgactgcagaacattctggaaactactcctgtgaggccaacaacggcctgggggcccagtgcagtgaggcagtgccagtctccatctcaggacctgatggctatagaagagacctcatgacagctggagttctctggggactgtttggtgtccttggtttcactggtgttgctttgctgttgtatgccttgttccacaagatatcaggttgtatctaccatttggattctccatattttgctatgacctttccactactgatatagattgaaattacaaaaaaagaagagagaaaagaaaactctccaaaagccaataatttctttttatgcttcataattctgcaaggctctgtgcaatgctcaatgtggtcatactgctaattatacaatatgtcactgttccctgtgcatagtcactggagattaaattatttacacattctttcaaaaaaaaaaaaaaaaaaaaaaaaaaaaaaaaaaaaa

SEQ ID NO: 11009 - DNA, 1335 bp, Homo sapiens
atgctgctgtggtcattgctggtcatctttgatgcagtcactgaacaggcagattcgctgacccttgtggcgccctcttctgtcttcgaaggagacagcatcgttctgaaatgccagggagaacagaactggaaaattcagaagatggcttaccataaggataacaaagagttatctgttttcaaaaaattctcagatttccttatccaaagtgcagttttaagtgacagtggtaactatttctgtagtaccaaaggacaactctttctctgggataaaacttcaaatatagtaaagataaaagtccaagagctctttcaacgtcctgtgctgactgccagctccttccagcccatcgaagggggtccagtgagcctgaaatgtgagacccggctctctccacagaggttggatgttcaactccagttctgcttcttcagagaaaaccaggtcctggggtcaggctggagcagctctccggagctccagatttctgccgtgtggagtgaagacacagggtcttactggtgcaaggcagaaacggtgactcacaggatcagaaaacagagcctccaatcccagattcacgtgcagagaatccccatctctaatgtaagcttggagatccgggcccccgggggacaggtgactgaaggacaaaaactgatcctgctctgctcagtggctgggggtacaggaaatgtcacattctcctggtacagagaggccacaggaaccagtatgggaaagaaaacccagcgttccctgtcagcagagctggagatcccagctgtgaaagagagtgatgccggcaaatattactgtagagctgacaacggccatgtgcctatccagagcaaggtggtgaatatccctgtgagaattccagtgtctcgccctgtcctcaccctcaggtctcctggggcccaggctgcagtgggggacctgctggagcttcactgtgaggccctgagaggctctcccccaatcttgtaccaattttatcatgaggatgtcacccttgggaacagctcggccccctctggaggaggggcctccttcaacctctctttgactgcagaacattctggaaactactcctgtgaggccaacaacggcctgggggcccagtgcagtgaggcagtgccagtctccatctcaggacctgatggctatagaagagacctcatgacagctggagttctctggggactgtttggtgtccttggtttcactggtgttgctttgctgttgtatgccttgttccacaagatatcaggttgtatctaccatttggattctccatattttgctatgacctttccactactgata

SEQ ID NO: 11010 - DNA, 1319 bp, Homo sapiens
tggtgaccaagagtacatctcttttcaaatagctggattaggtcctcatgctgctgtggtcattgctggtcatctttgatgcagtcactgaacaggcagattcgctgacccttgtggcgccctcttctgtcttcgaaggagacagcatcgttctgaaatgccagggagaacagaactggaaaattcagaagatggcttaccataaggataacaaagagttatctgttttcaaaaaattctcagatttccttatccaaagtgcagttttaagtgacagtggtaactatttctgtagtaccaaaggacaactctttctctgggataaaacttcaaatatagtaaagataaaagtccaaggaatccccatctctaatgtaagcttggagatccgggcccccgggggacaggtgactgaaggacaaaaactgatcctgctctgctcagtggctgggggtacaggaaatgtcacattctcctggtacagagaggccacaggaaccagtatgggaaagaaaacccagcgttccctgtcagcagagctggagatcccagctgtgaaagagagtgatgccggcaaatattactgtagagctgacaacggccatgtgcctatccagagcaaggtggtgaatatccctgtgagaattccagtgtctcgccctgtcctcaccctcaggtctcctggggcccaggctgcagtgggggacctgctggagcttcactgtgaggccctgagaggctctcccccaatcttgtaccaattttatcatgaggatgtcacccttgggaacagctcggccccctctggaggaggggcctccttcaacctctctttgactgcagaacattctggaaactactcctgtgaggccaacaacggcctgggggcccagtgcagtgaggcagtgccagtctccatctcaggacctgatggctatagaagagacctcatgacagctggagttctctggggactgtttggtgtccttggtttcactggtgttgctttgctgttgtatgccttgttccacaagatatcaggttgtatctaccatttggattctccatattttgctatgacctttccactactgatatagattgaaattacaaaaaaagaagagagaaaagaaaactctccaaaagccaataatttctttttatgcttcataattctgcaaggctctgtgcaatgctcaatgtggtcatactgctaattatacaatatgtcactgttccctgtgcatagtcactggagattaaattatttacacattctttcaaaaaaaaaaaaaaaaaaaaaaaaaaaaaaaaaaaaa

SEQ ID NO: 11011 - DNA, 1050 bp, Homo sapiens
atgctgctgtggtcattgctggtcatctttgatgcagtcactgaacaggcagattcgctgacccttgtggcgccctcttctgtcttcgaaggagacagcatcgttctgaaatgccagggagaacagaactggaaaattcagaagatggcttaccataaggataacaaagagttatctgttttcaaaaaattctcagatttccttatccaaagtgcagttttaagtgacagtggtaactatttctgtagtaccaaaggacaactctttctctgggataaaacttcaaatatagtaaagataaaagtccaaggaatccccatctctaatgtaagcttggagatccgggcccccgggggacaggtgactgaaggacaaaaactgatcctgctctgctcagtggctgggggtacaggaaatgtcacattctcctggtacagagaggccacaggaaccagtatgggaaagaaaacccagcgttccctgtcagcagagctggagatcccagctgtgaaagagagtgatgccggcaaatattactgtagagctgacaacggccatgtgcctatccagagcaaggtggtgaatatccctgtgagaattccagtgtctcgccctgtcctcaccctcaggtctcctggggcccaggctgcagtgggggacctgctggagcttcactgtgaggccctgagaggctctcccccaatcttgtaccaattttatcatgaggatgtcacccttgggaacagctcggccccctctggaggaggggcctccttcaacctctctttgactgcagaacattctggaaactactcctgtgaggccaacaacggcctgggggcccagtgcagtgaggcagtgccagtctccatctcaggacctgatggctatagaagagacctcatgacagctggagttctctggggactgtttggtgtccttggtttcactggtgttgctttgctgttgtatgccttgttccacaagatatcaggttgtatctaccatttggattctccatattttgctatgacctttccactactgata

SEQ ID NO: 11012 - DNA, 1325 bp, Homo sapiens
tggtgaccaagagtacatctcttttcaaatagctggattaggtcctcatgctgctgtggtcattgctggtcatctttgatgcagtcactgaacaggcagattcgctgacccttgtggcgccctcttctgtcttcgaaggagacagcatcgttctgaaatgccagggagaacagaactggaaaattcagaagatggcttaccataaggataacaaagagttatctgttttcaaaaaattctcagatttccttatccaaagtgcagttttaagtgacagtggtaactatttctgtagtaccaaaggacaactctttctctgggataaaacttcaaatatagtaaagataaaagtccaagagctctttcaacgtcctgtgctgactgccagctccttccagcccatcgaagggggtccagtgagcctgaaatgtgagacccggctctctccacagaggttggatgttcaactccagttctgcttcttcagagaaaaccaggtcctggggtcaggctggagcagctctccggagctccagatttctgccgtgtggagtgaagacacagggtcttactggtgcaaggcagaaacggtgactcacaggatcagaaaacagagcctccaatcccagattcacgtgcagagaatccccatctctaatgtaagcttggagatccgggcccccgggggacaggtgactgaaggacaaaaactgatcctgctctgctcagtggctgggggtacaggaaatgtcacattctcctggtacagagaggccacaggaaccagtatgggaaagaaaacccagcgttccctgtcagcagagctggagatcccagctgtgaaagagagtgatgccggcaaatattactgtagagctgacaacggccatgtgcctatccagagcaaggtggtgaatatccctgtgagaagacctgatggctatagaagagacctcatgacagctggagttctctggggactgtttggtgtccttggtttcactggtgttgctttgctgttgtatgccttgttccacaagatatcaggttgtatctaccatttggattctccatattttgctatgacctttccactactgatatagattgaaattacaaaaaaagaagagagaaaagaaaactctccaaaagccaataatttctttttatgcttcataattctgcaaggctctgtgcaatgctcaatgtggtcatactgctaattatacaatatgtcactgttccctgtgcatagtcactggagattaaattatttacacattctttcaaaaaaaaaaaaaaaaaaaaaaaaaaaaaaaaaaaaa

SEQ ID NO: 11013 - DNA, 1056 bp, Homo sapiens
atgctgctgtggtcattgctggtcatctttgatgcagtcactgaacaggcagattcgctgacccttgtggcgccctcttctgtcttcgaaggagacagcatcgttctgaaatgccagggagaacagaactggaaaattcagaagatggcttaccataaggataacaaagagttatctgttttcaaaaaattctcagatttccttatccaaagtgcagttttaagtgacagtggtaactatttctgtagtaccaaaggacaactctttctctgggataaaacttcaaatatagtaaagataaaagtccaagagctctttcaacgtcctgtgctgactgccagctccttccagcccatcgaagggggtccagtgagcctgaaatgtgagacccggctctctccacagaggttggatgttcaactccagttctgcttcttcagagaaaaccaggtcctggggtcaggctggagcagctctccggagctccagatttctgccgtgtggagtgaagacacagggtcttactggtgcaaggcagaaacggtgactcacaggatcagaaaacagagcctccaatcccagattcacgtgcagagaatccccatctctaatgtaagcttggagatccgggcccccgggggacaggtgactgaaggacaaaaactgatcctgctctgctcagtggctgggggtacaggaaatgtcacattctcctggtacagagaggccacaggaaccagtatgggaaagaaaacccagcgttccctgtcagcagagctggagatcccagctgtgaaagagagtgatgccggcaaatattactgtagagctgacaacggccatgtgcctatccagagcaaggtggtgaatatccctgtgagaagacctgatggctatagaagagacctcatgacagctggagttctctggggactgtttggtgtccttggtttcactggtgttgctttgctgttgtatgccttgttccacaagatatcaggttgtatctaccatttggattctccatattttgctatgacctttccactactgata

SEQ ID NO: 11014 - DNA, 1040 bp, Homo sapiens
tggtgaccaagagtacatctcttttcaaatagctggattaggtcctcatgctgctgtggtcattgctggtcatctttgatgcagtcactgaacaggcagattcgctgacccttgtggcgccctcttctgtcttcgaaggagacagcatcgttctgaaatgccagggagaacagaactggaaaattcagaagatggcttaccataaggataacaaagagttatctgttttcaaaaaattctcagatttccttatccaaagtgcagttttaagtgacagtggtaactatttctgtagtaccaaaggacaactctttctctgggataaaacttcaaatatagtaaagataaaagtccaaggaatccccatctctaatgtaagcttggagatccgggcccccgggggacaggtgactgaaggacaaaaactgatcctgctctgctcagtggctgggggtacaggaaatgtcacattctcctggtacagagaggccacaggaaccagtatgggaaagaaaacccagcgttccctgtcagcagagctggagatcccagctgtgaaagagagtgatgccggcaaatattactgtagagctgacaacggccatgtgcctatccagagcaaggtggtgaatatccctgtgagaagacctgatggctatagaagagacctcatgacagctggagttctctggggactgtttggtgtccttggtttcactggtgttgctttgctgttgtatgccttgttccacaagatatcaggttgtatctaccatttggattctccatattttgctatgacctttccactactgatatagattgaaattacaaaaaaagaagagagaaaagaaaactctccaaaagccaataatttctttttatgcttcataattctgcaaggctctgtgcaatgctcaatgtggtcatactgctaattatacaatatgtcactgttccctgtgcatagtcactggagattaaattatttacacattctttcaaaaaaaaaaaaaaaaaaaaaaaaaaaaaaaaaaaaa

SEQ ID NO: 11015 - DNA, 771 bp, Homo sapiens
atgctgctgtggtcattgctggtcatctttgatgcagtcactgaacaggcagattcgctgacccttgtggcgccctcttctgtcttcgaaggagacagcatcgttctgaaatgccagggagaacagaactggaaaattcagaagatggcttaccataaggataacaaagagttatctgttttcaaaaaattctcagatttccttatccaaagtgcagttttaagtgacagtggtaactatttctgtagtaccaaaggacaactctttctctgggataaaacttcaaatatagtaaagataaaagtccaaggaatccccatctctaatgtaagcttggagatccgggcccccgggggacaggtgactgaaggacaaaaactgatcctgctctgctcagtggctgggggtacaggaaatgtcacattctcctggtacagagaggccacaggaaccagtatgggaaagaaaacccagcgttccctgtcagcagagctggagatcccagctgtgaaagagagtgatgccggcaaatattactgtagagctgacaacggccatgtgcctatccagagcaaggtggtgaatatccctgtgagaagacctgatggctatagaagagacctcatgacagctggagttctctggggactgtttggtgtccttggtttcactggtgttgctttgctgttgtatgccttgttccacaagatatcaggttgtatctaccatttggattctccatattttgctatgacctttccactactgata

SEQ ID NO: 11016 - DNA, 2566 bp, Homo sapiens
  misc_feature (85)...(85): n = a, g, c or t
gacactcaacttcacagtgcctactggggccagaagcaatcatcttacctcaggagtcattgaggggctgctcagcacccttggnccagccaccgtggccttattattttgctacggcctcaaaagaaaaataggaagacgttcagccagggatccactcaggagccttcccagccctctaccccaagagttcacctacctcaactcacctaccccagggcagctacagcctatatatgaaaatgtgaatgttgtaagtggggatgaggtttattcactggcgtactataaccagccggagcaggaatcagtagcagcagaaaccctggggacacatatggaggacaagatgcagtcactgaacaggcagattcgctgacccttgtggcgccctcttctgtcttcgaaggagacagcatcgttctgaaatgccagggagaacagaactggaaaattcagaagatggcttaccataaggataacaaagagttatctgttttcaaaaaattctcagatttccttatccaaagtgcagttttaagtgacagtggtaactatttctgtagtaccaaaggacaactctttctctgggataaaacttcaaatatagtaaagataaaagtccaaggaatccccatctctaatgtaagcttggagatccgggcccccgggggacaggtgactgaaggacaaaaactgatcctgctctgctcagtggctgggggtacaggaaatgtcacattctcctggtacagagaggccacaggaaccagtatgggaaagaaaacccagcgttccctgtcagcagagctggagatcccagctgtgaaagagagtgatgccggcaaatattactgtagagctgacaacggccatgtgcctatccagagcaaggtggtgaatatccctgtgagaattccagtgtctcgccctgtcctcaccctcaggtctcctggggcccaggctgcagtgggggacctgctggagcttcactgtgaggccctgagaggctctcccccaatcttgtaccaattttatcatgaggatgtcacccttgggaacagctcggccccctctggaggaggggcctccttcaacctctctttgactgcagaacattctggaaactactcctgtgaggccaacaacggcctgggggcccagtgcagtgaggcagtgccagtctccatctcaggacctgatggctatagaagagacctcatgacagctggagttctctggggactgtttggtgtccttggtttcactggtgttgctttgctgttgtatgccttgttccacaagatatcaggagaaagttctgccactaatgaacccagaggggcttccaggccaaatcctcaagagttcacctattcaagcccaaccccagacatggaggagctgcagccagtgtatgtcaatgtgggctctgtagatgtggatgtggtttattctcaggtctggagcatgcagcagccagaaagctcagcaaacatcaggacacttctggagaacaaggactcccaagtcatctactcttctgtgaagaaatcataacacttggaggaatcagaagggaagatcaacagcaaggatggggcatcattaagacttgctataaaaccttatgaaaatgcttgaggcttatcacctgccacagccagaacgtgcctcaggaggcacctcctgtcatttttgtcctgatgatgtttcttctccaatatcttcttttacctatcaatattcattgaactgctgctacatccagacactgtgcaaataaattatttctgctaccttctcttaagcaatcagtgtgtaaagatttgagggaagaatgaataagagatacaaggtctcaccttcatctactgtgaagtgatgagaacaggacttgatagtggtgtattaacttatttatgtgctgctggatacagtttgctaatattttgttgagaatttttgcaaatatgttcattgggaatattggcctgaaattttcttttccactgtgtctctgccagaatgtttgtatcaggctgatgctggcttcatagaatgagttaggcaggagcccttcctccttgattttttggcatagtttcagcaggattggtaccagttattctttctgcatcttgtagaattcagctatgaatccatctggtctagggcttttgtgttggttggtaagttttttattactaattcaacttcagcgcttgatattggtctaggaggggtttctgtctcttcctggttcaatcttgggagattgtgtgtttccaggaatttagccgtttcctccagattttcttctttatgtgcatcgacttgagtgtaaacataacttatatgcactgggaaaccaaaaaatctgtgtgacttgctttattgcagcatttgttttattttggtagtctggaactgaacctgcaatatcaccaaagtatgcatatagttgcaaaaatgtgatttttgacatagtaaatatgagtatttgcaataaactatgatattacttttgtaagtatatagaataaaatgtaaataatctataaaa

SEQ ID NO: 11017 - DNA, 1095 bp, Homo sapiens
atggcttaccataaggataacaaagagttatctgttttcaaaaaattctcagatttccttatccaaagtgcagttttaagtgacagtggtaactatttctgtagtaccaaaggacaactctttctctgggataaaacttcaaatatagtaaagataaaagtccaaggaatccccatctctaatgtaagcttggagatccgggcccccgggggacaggtgactgaaggacaaaaactgatcctgctctgctcagtggctgggggtacaggaaatgtcacattctcctggtacagagaggccacaggaaccagtatgggaaagaaaacccagcgttccctgtcagcagagctggagatcccagctgtgaaagagagtgatgccggcaaatattactgtagagctgacaacggccatgtgcctatccagagcaaggtggtgaatatccctgtgagaattccagtgtctcgccctgtcctcaccctcaggtctcctggggcccaggctgcagtgggggacctgctggagcttcactgtgaggccctgagaggctctcccccaatcttgtaccaattttatcatgaggatgtcacccttgggaacagctcggccccctctggaggaggggcctccttcaacctctctttgactgcagaacattctggaaactactcctgtgaggccaacaacggcctgggggcccagtgcagtgaggcagtgccagtctccatctcaggacctgatggctatagaagagacctcatgacagctggagttctctggggactgtttggtgtccttggtttcactggtgttgctttgctgttgtatgccttgttccacaagatatcaggagaaagttctgccactaatgaacccagaggggcttccaggccaaatcctcaagagttcacctattcaagcccaaccccagacatggaggagctgcagccagtgtatgtcaatgtgggctctgtagatgtggatgtggtttattctcaggtctggagcatgcagcagccagaaagctcagcaaacatcaggacacttctggagaacaaggactcccaagtcatctactcttctgtgaagaaatca

SEQ ID NO: 11018 - DNA, 2851 bp, Homo sapiens
  misc_feature (85)...(85): n = a, g, c or t
gacactcaacttcacagtgcctactggggccagaagcaatcatcttacctcaggagtcattgaggggctgctcagcacccttggnccagccaccgtggccttattattttgctacggcctcaaaagaaaaataggaagacgttcagccagggatccactcaggagccttcccagccctctaccccaagagttcacctacctcaactcacctaccccagggcagctacagcctatatatgaaaatgtgaatgttgtaagtggggatgaggtttattcactggcgtactataaccagccggagcaggaatcagtagcagcagaaaccctggggacacatatggaggacaagatgcagtcactgaacaggcagattcgctgacccttgtggcgccctcttctgtcttcgaaggagacagcatcgttctgaaatgccagggagaacagaactggaaaattcagaagatggcttaccataaggataacaaagagttatctgttttcaaaaaattctcagatttccttatccaaagtgcagttttaagtgacagtggtaactatttctgtagtaccaaaggacaactctttctctgggataaaacttcaaatatagtaaagataaaagtccaagagctctttcaacgtcctgtgctgactgccagctccttccagcccatcgaagggggtccagtgagcctgaaatgtgagacccggctctctccacagaggttggatgttcaactccagttctgcttcttcagagaaaaccaggtcctggggtcaggctggagcagctctccggagctccagatttctgccgtgtggagtgaagacacagggtcttactggtgcaaggcagaaacggtgactcacaggatcagaaaacagagcctccaatcccagattcacgtgcagagaatccccatctctaatgtaagcttggagatccgggcccccgggggacaggtgactgaaggacaaaaactgatcctgctctgctcagtggctgggggtacaggaaatgtcacattctcctggtacagagaggccacaggaaccagtatgggaaagaaaacccagcgttccctgtcagcagagctggagatcccagctgtgaaagagagtgatgccggcaaatattactgtagagctgacaacggccatgtgcctatccagagcaaggtggtgaatatccctgtgagaattccagtgtctcgccctgtcctcaccctcaggtctcctggggcccaggctgcagtgggggacctgctggagcttcactgtgaggccctgagaggctctcccccaatcttgtaccaattttatcatgaggatgtcacccttgggaacagctcggccccctctggaggaggggcctccttcaacctctctttgactgcagaacattctggaaactactcctgtgaggccaacaacggcctgggggcccagtgcagtgaggcagtgccagtctccatctcaggacctgatggctatagaagagacctcatgacagctggagttctctggggactgtttggtgtccttggtttcactggtgttgctttgctgttgtatgccttgttccacaagatatcaggagaaagttctgccactaatgaacccagaggggcttccaggccaaatcctcaagagttcacctattcaagcccaaccccagacatggaggagctgcagccagtgtatgtcaatgtgggctctgtagatgtggatgtggtttattctcaggtctggagcatgcagcagccagaaagctcagcaaacatcaggacacttctggagaacaaggactcccaagtcatctactcttctgtgaagaaatcataacacttggaggaatcagaagggaagatcaacagcaaggatggggcatcattaagacttgctataaaaccttatgaaaatgcttgaggcttatcacctgccacagccagaacgtgcctcaggaggcacctcctgtcatttttgtcctgatgatgtttcttctccaatatcttcttttacctatcaatattcattgaactgctgctacatccagacactgtgcaaataaattatttctgctaccttctcttaagcaatcagtgtgtaaagatttgagggaagaatgaataagagatacaaggtctcaccttcatctactgtgaagtgatgagaacaggacttgatagtggtgtattaacttatttatgtgctgctggatacagtttgctaatattttgttgagaatttttgcaaatatgttcattgggaatattggcctgaaattttcttttccactgtgtctctgccagaatgtttgtatcaggctgatgctggcttcatagaatgagttaggcaggagcccttcctccttgattttttggcatagtttcagcaggattggtaccagttattctttctgcatcttgtagaattcagctatgaatccatctggtctagggcttttgtgttggttggtaagttttttattactaattcaacttcagcgcttgatattggtctaggaggggtttctgtctcttcctggttcaatcttgggagattgtgtgtttccaggaatttagccgtttcctccagattttcttctttatgtgcatcgacttgagtgtaaacataacttatatgcactgggaaaccaaaaaatctgtgtgacttgctttattgcagcatttgttttattttggtagtctggaactgaacctgcaatatcaccaaagtatgcatatagttgcaaaaatgtgatttttgacatagtaaatatgagtatttgcaataaactatgatattacttttgtaagtatatagaataaaatgtaaataatctataaaa

SEQ ID NO: 11019 - DNA, 1380 bp, Homo sapiens
atggcttaccataaggataacaaagagttatctgttttcaaaaaattctcagatttccttatccaaagtgcagttttaagtgacagtggtaactatttctgtagtaccaaaggacaactctttctctgggataaaacttcaaatatagtaaagataaaagtccaagagctctttcaacgtcctgtgctgactgccagctccttccagcccatcgaagggggtccagtgagcctgaaatgtgagacccggctctctccacagaggttggatgttcaactccagttctgcttcttcagagaaaaccaggtcctggggtcaggctggagcagctctccggagctccagatttctgccgtgtggagtgaagacacagggtcttactggtgcaaggcagaaacggtgactcacaggatcagaaaacagagcctccaatcccagattcacgtgcagagaatccccatctctaatgtaagcttggagatccgggcccccgggggacaggtgactgaaggacaaaaactgatcctgctctgctcagtggctgggggtacaggaaatgtcacattctcctggtacagagaggccacaggaaccagtatgggaaagaaaacccagcgttccctgtcagcagagctggagatcccagctgtgaaagagagtgatgccggcaaatattactgtagagctgacaacggccatgtgcctatccagagcaaggtggtgaatatccctgtgagaattccagtgtctcgccctgtcctcaccctcaggtctcctggggcccaggctgcagtgggggacctgctggagcttcactgtgaggccctgagaggctctcccccaatcttgtaccaattttatcatgaggatgtcacccttgggaacagctcggccccctctggaggaggggcctccttcaacctctctttgactgcagaacattctggaaactactcctgtgaggccaacaacggcctgggggcccagtgcagtgaggcagtgccagtctccatctcaggacctgatggctatagaagagacctcatgacagctggagttctctggggactgtttggtgtccttggtttcactggtgttgctttgctgttgtatgccttgttccacaagatatcaggagaaagttctgccactaatgaacccagaggggcttccaggccaaatcctcaagagttcacctattcaagcccaaccccagacatggaggagctgcagccagtgtatgtcaatgtgggctctgtagatgtggatgtggtttattctcaggtctggagcatgcagcagccagaaagctcagcaaacatcaggacacttctggagaacaaggactcccaagtcatctactcttctgtgaagaaatca

SEQ ID NO: 11020 - DNA, 2287 bp, Homo sapiens
  misc_feature (85)...(85): n = a, g, c or t
gacactcaacttcacagtgcctactggggccagaagcaatcatcttacctcaggagtcattgaggggctgctcagcacccttggnccagccaccgtggccttattattttgctacggcctcaaaagaaaaataggaagacgttcagccagggatccactcaggagccttcccagccctctaccccaagagttcacctacctcaactcacctaccccagggcagctacagcctatatatgaaaatgtgaatgttgtaagtggggatgaggtttattcactggcgtactataaccagccggagcaggaatcagtagcagcagaaaccctggggacacatatggaggacaagatgcagtcactgaacaggcagattcgctgacccttgtggcgccctcttctgtcttcgaaggagacagcatcgttctgaaatgccagggagaacagaactggaaaattcagaagatggcttaccataaggataacaaagagttatctgttttcaaaaaattctcagatttccttatccaaagtgcagttttaagtgacagtggtaactatttctgtagtaccaaaggacaactctttctctgggataaaacttcaaatatagtaaagataaaagtccaaggaatccccatctctaatgtaagcttggagatccgggcccccgggggacaggtgactgaaggacaaaaactgatcctgctctgctcagtggctgggggtacaggaaatgtcacattctcctggtacagagaggccacaggaaccagtatgggaaagaaaacccagcgttccctgtcagcagagctggagatcccagctgtgaaagagagtgatgccggcaaatattactgtagagctgacaacggccatgtgcctatccagagcaaggtggtgaatatccctgtgagaagacctgatggctatagaagagacctcatgacagctggagttctctggggactgtttggtgtccttggtttcactggtgttgctttgctgttgtatgccttgttccacaagatatcaggagaaagttctgccactaatgaacccagaggggcttccaggccaaatcctcaagagttcacctattcaagcccaaccccagacatggaggagctgcagccagtgtatgtcaatgtgggctctgtagatgtggatgtggtttattctcaggtctggagcatgcagcagccagaaagctcagcaaacatcaggacacttctggagaacaaggactcccaagtcatctactcttctgtgaagaaatcataacacttggaggaatcagaagggaagatcaacagcaaggatggggcatcattaagacttgctataaaaccttatgaaaatgcttgaggcttatcacctgccacagccagaacgtgcctcaggaggcacctcctgtcatttttgtcctgatgatgtttcttctccaatatcttcttttacctatcaatattcattgaactgctgctacatccagacactgtgcaaataaattatttctgctaccttctcttaagcaatcagtgtgtaaagatttgagggaagaatgaataagagatacaaggtctcaccttcatctactgtgaagtgatgagaacaggacttgatagtggtgtattaacttatttatgtgctgctggatacagtttgctaatattttgttgagaatttttgcaaatatgttcattgggaatattggcctgaaattttcttttccactgtgtctctgccagaatgtttgtatcaggctgatgctggcttcatagaatgagttaggcaggagcccttcctccttgattttttggcatagtttcagcaggattggtaccagttattctttctgcatcttgtagaattcagctatgaatccatctggtctagggcttttgtgttggttggtaagttttttattactaattcaacttcagcgcttgatattggtctaggaggggtttctgtctcttcctggttcaatcttgggagattgtgtgtttccaggaatttagccgtttcctccagattttcttctttatgtgcatcgacttgagtgtaaacataacttatatgcactgggaaaccaaaaaatctgtgtgacttgctttattgcagcatttgttttattttggtagtctggaactgaacctgcaatatcaccaaagtatgcatatagttgcaaaaatgtgatttttgacatagtaaatatgagtatttgcaataaactatgatattacttttgtaagtatatagaataaaatgtaaataatctataaaa

SEQ ID NO: 11021 - DNA, 816 bp, Homo sapiens
atggcttaccataaggataacaaagagttatctgttttcaaaaaattctcagatttccttatccaaagtgcagttttaagtgacagtggtaactatttctgtagtaccaaaggacaactctttctctgggataaaacttcaaatatagtaaagataaaagtccaaggaatccccatctctaatgtaagcttggagatccgggcccccgggggacaggtgactgaaggacaaaaactgatcctgctctgctcagtggctgggggtacaggaaatgtcacattctcctggtacagagaggccacaggaaccagtatgggaaagaaaacccagcgttccctgtcagcagagctggagatcccagctgtgaaagagagtgatgccggcaaatattactgtagagctgacaacggccatgtgcctatccagagcaaggtggtgaatatccctgtgagaagacctgatggctatagaagagacctcatgacagctggagttctctggggactgtttggtgtccttggtttcactggtgttgctttgctgttgtatgccttgttccacaagatatcaggagaaagttctgccactaatgaacccagaggggcttccaggccaaatcctcaagagttcacctattcaagcccaaccccagacatggaggagctgcagccagtgtatgtcaatgtgggctctgtagatgtggatgtggtttattctcaggtctggagcatgcagcagccagaaagctcagcaaacatcaggacacttctggagaacaaggactcccaagtcatctactcttctgtgaagaaatca

SEQ ID NO: 11022 - DNA, 2572 bp, Homo sapiens
  misc_feature (85)...(85): n = a, g, c or t
gacactcaacttcacagtgcctactggggccagaagcaatcatcttacctcaggagtcattgaggggctgctcagcacccttggnccagccaccgtggccttattattttgctacggcctcaaaagaaaaataggaagacgttcagccagggatccactcaggagccttcccagccctctaccccaagagttcacctacctcaactcacctaccccagggcagctacagcctatatatgaaaatgtgaatgttgtaagtggggatgaggtttattcactggcgtactataaccagccggagcaggaatcagtagcagcagaaaccctggggacacatatggaggacaagatgcagtcactgaacaggcagattcgctgacccttgtggcgccctcttctgtcttcgaaggagacagcatcgttctgaaatgccagggagaacagaactggaaaattcagaagatggcttaccataaggataacaaagagttatctgttttcaaaaaattctcagatttccttatccaaagtgcagttttaagtgacagtggtaactatttctgtagtaccaaaggacaactctttctctgggataaaacttcaaatatagtaaagataaaagtccaagagctctttcaacgtcctgtgctgactgccagctccttccagcccatcgaagggggtccagtgagcctgaaatgtgagacccggctctctccacagaggttggatgttcaactccagttctgcttcttcagagaaaaccaggtcctggggtcaggctggagcagctctccggagctccagatttctgccgtgtggagtgaagacacagggtcttactggtgcaaggcagaaacggtgactcacaggatcagaaaacagagcctccaatcccagattcacgtgcagagaatccccatctctaatgtaagcttggagatccgggcccccgggggacaggtgactgaaggacaaaaactgatcctgctctgctcagtggctgggggtacaggaaatgtcacattctcctggtacagagaggccacaggaaccagtatgggaaagaaaacccagcgttccctgtcagcagagctggagatcccagctgtgaaagagagtgatgccggcaaatattactgtagagctgacaacggccatgtgcctatccagagcaaggtggtgaatatccctgtgagaagacctgatggctatagaagagacctcatgacagctggagttctctggggactgtttggtgtccttggtttcactggtgttgctttgctgttgtatgccttgttccacaagatatcaggagaaagttctgccactaatgaacccagaggggcttccaggccaaatcctcaagagttcacctattcaagcccaaccccagacatggaggagctgcagccagtgtatgtcaatgtgggctctgtagatgtggatgtggtttattctcaggtctggagcatgcagcagccagaaagctcagcaaacatcaggacacttctggagaacaaggactcccaagtcatctactcttctgtgaagaaatcataacacttggaggaatcagaagggaagatcaacagcaaggatggggcatcattaagacttgctataaaaccttatgaaaatgcttgaggcttatcacctgccacagccagaacgtgcctcaggaggcacctcctgtcatttttgtcctgatgatgtttcttctccaatatcttcttttacctatcaatattcattgaactgctgctacatccagacactgtgcaaataaattatttctgctaccttctcttaagcaatcagtgtgtaaagatttgagggaagaatgaataagagatacaaggtctcaccttcatctactgtgaagtgatgagaacaggacttgatagtggtgtattaacttatttatgtgctgctggatacagtttgctaatattttgttgagaatttttgcaaatatgttcattgggaatattggcctgaaattttcttttccactgtgtctctgccagaatgtttgtatcaggctgatgctggcttcatagaatgagttaggcaggagcccttcctccttgattttttggcatagtttcagcaggattggtaccagttattctttctgcatcttgtagaattcagctatgaatccatctggtctagggcttttgtgttggttggtaagttttttattactaattcaacttcagcgcttgatattggtctaggaggggtttctgtctcttcctggttcaatcttgggagattgtgtgtttccaggaatttagccgtttcctccagattttcttctttatgtgcatcgacttgagtgtaaacataacttatatgcactgggaaaccaaaaaatctgtgtgacttgctttattgcagcatttgttttattttggtagtctggaactgaacctgcaatatcaccaaagtatgcatatagttgcaaaaatgtgatttttgacatagtaaatatgagtatttgcaataaactatgatattacttttgtaagtatatagaataaaatgtaaataatctataaaa

SEQ ID NO: 11023 - DNA, 1101 bp, Homo sapiens
atggcttaccataaggataacaaagagttatctgttttcaaaaaattctcagatttccttatccaaagtgcagttttaagtgacagtggtaactatttctgtagtaccaaaggacaactctttctctgggataaaacttcaaatatagtaaagataaaagtccaagagctctttcaacgtcctgtgctgactgccagctccttccagcccatcgaagggggtccagtgagcctgaaatgtgagacccggctctctccacagaggttggatgttcaactccagttctgcttcttcagagaaaaccaggtcctggggtcaggctggagcagctctccggagctccagatttctgccgtgtggagtgaagacacagggtcttactggtgcaaggcagaaacggtgactcacaggatcagaaaacagagcctccaatcccagattcacgtgcagagaatccccatctctaatgtaagcttggagatccgggcccccgggggacaggtgactgaaggacaaaaactgatcctgctctgctcagtggctgggggtacaggaaatgtcacattctcctggtacagagaggccacaggaaccagtatgggaaagaaaacccagcgttccctgtcagcagagctggagatcccagctgtgaaagagagtgatgccggcaaatattactgtagagctgacaacggccatgtgcctatccagagcaaggtggtgaatatccctgtgagaagacctgatggctatagaagagacctcatgacagctggagttctctggggactgtttggtgtccttggtttcactggtgttgctttgctgttgtatgccttgttccacaagatatcaggagaaagttctgccactaatgaacccagaggggcttccaggccaaatcctcaagagttcacctattcaagcccaaccccagacatggaggagctgcagccagtgtatgtcaatgtgggctctgtagatgtggatgtggtttattctcaggtctggagcatgcagcagccagaaagctcagcaaacatcaggacacttctggagaacaaggactcccaagtcatctactcttctgtgaagaaatca

SEQ ID NO: 11024 - DNA, 1590 bp, Homo sapiens
  misc_feature (85)...(85): n = g, a, c or t
gacactcaacttcacagtgcctactggggccagaagcaatcatcttacctcaggagtcattgaggggctgctcagcacccttggnccagccaccgtggccttattattttgctacggcctcaaaagaaaaataggaagacgttcagccagggatccactcaggagccttcccagccctctaccccaagagttcacctacctcaactcacctaccccagggcagctacagcctatatatgaaaatgtgaatgttgtaagtggggatgaggtttattcactggcgtactataaccagccggagcaggaatcagtagcagcagaaaccctggggacacatatggaggacaagatgcagtcactgaacaggcagattcgctgacccttgtggcgccctcttctgtcttcgaaggagacagcatcgttctgaaatgccagggagaacagaactggaaaattcagaagatggcttaccataaggataacaaagagttatctgttttcaaaaaattctcagatttccttatccaaagtgcagttttaagtgacagtggtaactatttctgtagtaccaaaggacaactctttctctgggataaaacttcaaatatagtaaagataaaagtccaaggaatccccatctctaatgtaagcttggagatccgggcccccgggggacaggtgactgaaggacaaaaactgatcctgctctgctcagtggctgggggtacaggaaatgtcacattctcctggtacagagaggccacaggaaccagtatgggaaagaaaacccagcgttccctgtcagcagagctggagatcccagctgtgaaagagagtgatgccggcaaatattactgtagagctgacaacggccatgtgcctatccagagcaaggtggtgaatatccctgtgagaattccagtgtctcgccctgtcctcaccctcaggtctcctggggcccaggctgcagtgggggacctgctggagcttcactgtgaggccctgagaggctctcccccaatcttgtaccaattttatcatgaggatgtcacccttgggaacagctcggccccctctggaggaggggcctccttcaacctctctttgactgcagaacattctggaaactactcctgtgaggccaacaacggcctgggggcccagtgcagtgaggcagtgccagtctccatctcaggacctgatggctatagaagagacctcatgacagctggagttctctggggactgtttggtgtccttggtttcactggtgttgctttgctgttgtatgccttgttccacaagatatcaggttgtatctaccatttggattctccatattttgctatgacctttccactactgatatagattgaaattacaaaaaaagaagagagaaaagaaaactctccaaaagccaataatttctttttatgcttcataattctgcaaggctctgtgcaatgctcaatgtggtcatactgctaattatacaatatgtcactgttccctgtgcatagtcactggagattaaattatttacacattctttcaaaaaaaaaaaaaaaaaaaaaaaaaaaaaaaaaaaaa

SEQ ID NO: 11025 - DNA, 906 bp, Homo sapiens
atggcttaccataaggataacaaagagttatctgttttcaaaaaattctcagatttccttatccaaagtgcagttttaagtgacagtggtaactatttctgtagtaccaaaggacaactctttctctgggataaaacttcaaatatagtaaagataaaagtccaaggaatccccatctctaatgtaagcttggagatccgggcccccgggggacaggtgactgaaggacaaaaactgatcctgctctgctcagtggctgggggtacaggaaatgtcacattctcctggtacagagaggccacaggaaccagtatgggaaagaaaacccagcgttccctgtcagcagagctggagatcccagctgtgaaagagagtgatgccggcaaatattactgtagagctgacaacggccatgtgcctatccagagcaaggtggtgaatatccctgtgagaattccagtgtctcgccctgtcctcaccctcaggtctcctggggcccaggctgcagtgggggacctgctggagcttcactgtgaggccctgagaggctctcccccaatcttgtaccaattttatcatgaggatgtcacccttgggaacagctcggccccctctggaggaggggcctccttcaacctctctttgactgcagaacattctggaaactactcctgtgaggccaacaacggcctgggggcccagtgcagtgaggcagtgccagtctccatctcaggacctgatggctatagaagagacctcatgacagctggagttctctggggactgtttggtgtccttggtttcactggtgttgctttgctgttgtatgccttgttccacaagatatcaggttgtatctaccatttggattctccatattttgctatgacctttccactactgata

SEQ ID NO: 11026 - DNA, 1875 bp, Homo sapiens
  misc_feature (85)...(85): n = g, a, c or t
gacactcaacttcacagtgcctactggggccagaagcaatcatcttacctcaggagtcattgaggggctgctcagcacccttggnccagccaccgtggccttattattttgctacggcctcaaaagaaaaataggaagacgttcagccagggatccactcaggagccttcccagccctctaccccaagagttcacctacctcaactcacctaccccagggcagctacagcctatatatgaaaatgtgaatgttgtaagtggggatgaggtttattcactggcgtactataaccagccggagcaggaatcagtagcagcagaaaccctggggacacatatggaggacaagatgcagtcactgaacaggcagattcgctgacccttgtggcgccctcttctgtcttcgaaggagacagcatcgttctgaaatgccagggagaacagaactggaaaattcagaagatggcttaccataaggataacaaagagttatctgttttcaaaaaattctcagatttccttatccaaagtgcagttttaagtgacagtggtaactatttctgtagtaccaaaggacaactctttctctgggataaaacttcaaatatagtaaagataaaagtccaagagctctttcaacgtcctgtgctgactgccagctccttccagcccatcgaagggggtccagtgagcctgaaatgtgagacccggctctctccacagaggttggatgttcaactccagttctgcttcttcagagaaaaccaggtcctggggtcaggctggagcagctctccggagctccagatttctgccgtgtggagtgaagacacagggtcttactggtgcaaggcagaaacggtgactcacaggatcagaaaacagagcctccaatcccagattcacgtgcagagaatccccatctctaatgtaagcttggagatccgggcccccgggggacaggtgactgaaggacaaaaactgatcctgctctgctcagtggctgggggtacaggaaatgtcacattctcctggtacagagaggccacaggaaccagtatgggaaagaaaacccagcgttccctgtcagcagagctggagatcccagctgtgaaagagagtgatgccggcaaatattactgtagagctgacaacggccatgtgcctatccagagcaaggtggtgaatatccctgtgagaattccagtgtctcgccctgtcctcaccctcaggtctcctggggcccaggctgcagtgggggacctgctggagcttcactgtgaggccctgagaggctctcccccaatcttgtaccaattttatcatgaggatgtcacccttgggaacagctcggccccctctggaggaggggcctccttcaacctctctttgactgcagaacattctggaaactactcctgtgaggccaacaacggcctgggggcccagtgcagtgaggcagtgccagtctccatctcaggacctgatggctatagaagagacctcatgacagctggagttctctggggactgtttggtgtccttggtttcactggtgttgctttgctgttgtatgccttgttccacaagatatcaggttgtatctaccatttggattctccatattttgctatgacctttccactactgatatagattgaaattacaaaaaaagaagagagaaaagaaaactctccaaaagccaataatttctttttatgcttcataattctgcaaggctctgtgcaatgctcaatgtggtcatactgctaattatacaatatgtcactgttccctgtgcatagtcactggagattaaattatttacacattctttcaaaaaaaaaaaaaaaaaaaaaaaaaaaaaaaaaaaaa

SEQ ID NO: 11027 - DNA, 1191 bp, Homo sapiens
atggcttaccataaggataacaaagagttatctgttttcaaaaaattctcagatttccttatccaaagtgcagttttaagtgacagtggtaactatttctgtagtaccaaaggacaactctttctctgggataaaacttcaaatatagtaaagataaaagtccaagagctctttcaacgtcctgtgctgactgccagctccttccagcccatcgaagggggtccagtgagcctgaaatgtgagacccggctctctccacagaggttggatgttcaactccagttctgcttcttcagagaaaaccaggtcctggggtcaggctggagcagctctccggagctccagatttctgccgtgtggagtgaagacacagggtcttactggtgcaaggcagaaacggtgactcacaggatcagaaaacagagcctccaatcccagattcacgtgcagagaatccccatctctaatgtaagcttggagatccgggcccccgggggacaggtgactgaaggacaaaaactgatcctgctctgctcagtggctgggggtacaggaaatgtcacattctcctggtacagagaggccacaggaaccagtatgggaaagaaaacccagcgttccctgtcagcagagctggagatcccagctgtgaaagagagtgatgccggcaaatattactgtagagctgacaacggccatgtgcctatccagagcaaggtggtgaatatccctgtgagaattccagtgtctcgccctgtcctcaccctcaggtctcctggggcccaggctgcagtgggggacctgctggagcttcactgtgaggccctgagaggctctcccccaatcttgtaccaattttatcatgaggatgtcacccttgggaacagctcggccccctctggaggaggggcctccttcaacctctctttgactgcagaacattctggaaactactcctgtgaggccaacaacggcctgggggcccagtgcagtgaggcagtgccagtctccatctcaggacctgatggctatagaagagacctcatgacagctggagttctctggggactgtttggtgtccttggtttcactggtgttgctttgctgttgtatgccttgttccacaagatatcaggttgtatctaccatttggattctccatattttgctatgacctttccactactgata

SEQ ID NO: 11028 - DNA, 1311 bp, Homo sapiens
  misc_feature (85)...(85): n = g, a, c or t
gacactcaacttcacagtgcctactggggccagaagcaatcatcttacctcaggagtcattgaggggctgctcagcacccttggnccagccaccgtggccttattattttgctacggcctcaaaagaaaaataggaagacgttcagccagggatccactcaggagccttcccagccctctaccccaagagttcacctacctcaactcacctaccccagggcagctacagcctatatatgaaaatgtgaatgttgtaagtggggatgaggtttattcactggcgtactataaccagccggagcaggaatcagtagcagcagaaaccctggggacacatatggaggacaagatgcagtcactgaacaggcagattcgctgacccttgtggcgccctcttctgtcttcgaaggagacagcatcgttctgaaatgccagggagaacagaactggaaaattcagaagatggcttaccataaggataacaaagagttatctgttttcaaaaaattctcagatttccttatccaaagtgcagttttaagtgacagtggtaactatttctgtagtaccaaaggacaactctttctctgggataaaacttcaaatatagtaaagataaaagtccaaggaatccccatctctaatgtaagcttggagatccgggcccccgggggacaggtgactgaaggacaaaaactgatcctgctctgctcagtggctgggggtacaggaaatgtcacattctcctggtacagagaggccacaggaaccagtatgggaaagaaaacccagcgttccctgtcagcagagctggagatcccagctgtgaaagagagtgatgccggcaaatattactgtagagctgacaacggccatgtgcctatccagagcaaggtggtgaatatccctgtgagaagacctgatggctatagaagagacctcatgacagctggagttctctggggactgtttggtgtccttggtttcactggtgttgctttgctgttgtatgccttgttccacaagatatcaggttgtatctaccatttggattctccatattttgctatgacctttccactactgatatagattgaaattacaaaaaaagaagagagaaaagaaaactctccaaaagccaataatttctttttatgcttcataattctgcaaggctctgtgcaatgctcaatgtggtcatactgctaattatacaatatgtcactgttccctgtgcatagtcactggagattaaattatttacacattctttcaaaaaaaaaaaaaaaaaaaaaaaaaaaaaaaaaaaaa

SEQ ID NO: 11029 - DNA, 627 bp, Homo sapiens
atggcttaccataaggataacaaagagttatctgttttcaaaaaattctcagatttccttatccaaagtgcagttttaagtgacagtggtaactatttctgtagtaccaaaggacaactctttctctgggataaaacttcaaatatagtaaagataaaagtccaaggaatccccatctctaatgtaagcttggagatccgggcccccgggggacaggtgactgaaggacaaaaactgatcctgctctgctcagtggctgggggtacaggaaatgtcacattctcctggtacagagaggccacaggaaccagtatgggaaagaaaacccagcgttccctgtcagcagagctggagatcccagctgtgaaagagagtgatgccggcaaatattactgtagagctgacaacggccatgtgcctatccagagcaaggtggtgaatatccctgtgagaagacctgatggctatagaagagacctcatgacagctggagttctctggggactgtttggtgtccttggtttcactggtgttgctttgctgttgtatgccttgttccacaagatatcaggttgtatctaccatttggattctccatattttgctatgacctttccactactgata

SEQ ID NO: 11030 - DNA, 1596 bp, Homo sapiens
  misc_feature (85)...(85): n = g, a, c or t
gacactcaacttcacagtgcctactggggccagaagcaatcatcttacctcaggagtcattgaggggctgctcagcacccttggnccagccaccgtggccttattattttgctacggcctcaaaagaaaaataggaagacgttcagccagggatccactcaggagccttcccagccctctaccccaagagttcacctacctcaactcacctaccccagggcagctacagcctatatatgaaaatgtgaatgttgtaagtggggatgaggtttattcactggcgtactataaccagccggagcaggaatcagtagcagcagaaaccctggggacacatatggaggacaagatgcagtcactgaacaggcagattcgctgacccttgtggcgccctcttctgtcttcgaaggagacagcatcgttctgaaatgccagggagaacagaactggaaaattcagaagatggcttaccataaggataacaaagagttatctgttttcaaaaaattctcagatttccttatccaaagtgcagttttaagtgacagtggtaactatttctgtagtaccaaaggacaactctttctctgggataaaacttcaaatatagtaaagataaaagtccaagagctctttcaacgtcctgtgctgactgccagctccttccagcccatcgaagggggtccagtgagcctgaaatgtgagacccggctctctccacagaggttggatgttcaactccagttctgcttcttcagagaaaaccaggtcctggggtcaggctggagcagctctccggagctccagatttctgccgtgtggagtgaagacacagggtcttactggtgcaaggcagaaacggtgactcacaggatcagaaaacagagcctccaatcccagattcacgtgcagagaatccccatctctaatgtaagcttggagatccgggcccccgggggacaggtgactgaaggacaaaaactgatcctgctctgctcagtggctgggggtacaggaaatgtcacattctcctggtacagagaggccacaggaaccagtatgggaaagaaaacccagcgttccctgtcagcagagctggagatcccagctgtgaaagagagtgatgccggcaaatattactgtagagctgacaacggccatgtgcctatccagagcaaggtggtgaatatccctgtgagaagacctgatggctatagaagagacctcatgacagctggagttctctggggactgtttggtgtccttggtttcactggtgttgctttgctgttgtatgccttgttccacaagatatcaggttgtatctaccatttggattctccatattttgctatgacctttccactactgatatagattgaaattacaaaaaaagaagagagaaaagaaaactctccaaaagccaataatttctttttatgcttcataattctgcaaggctctgtgcaatgctcaatgtggtcatactgctaattatacaatatgtcactgttccctgtgcatagtcactggagattaaattatttacacattctttcaaaaaaaaaaaaaaaaaaaaaaaaaaaaaaaaaaaaa

SEQ ID NO: 11031 - DNA, 912 bp, Homo sapiens
atggcttaccataaggataacaaagagttatctgttttcaaaaaattctcagatttccttatccaaagtgcagttttaagtgacagtggtaactatttctgtagtaccaaaggacaactctttctctgggataaaacttcaaatatagtaaagataaaagtccaagagctctttcaacgtcctgtgctgactgccagctccttccagcccatcgaagggggtccagtgagcctgaaatgtgagacccggctctctccacagaggttggatgttcaactccagttctgcttcttcagagaaaaccaggtcctggggtcaggctggagcagctctccggagctccagatttctgccgtgtggagtgaagacacagggtcttactggtgcaaggcagaaacggtgactcacaggatcagaaaacagagcctccaatcccagattcacgtgcagagaatccccatctctaatgtaagcttggagatccgggcccccgggggacaggtgactgaaggacaaaaactgatcctgctctgctcagtggctgggggtacaggaaatgtcacattctcctggtacagagaggccacaggaaccagtatgggaaagaaaacccagcgttccctgtcagcagagctggagatcccagctgtgaaagagagtgatgccggcaaatattactgtagagctgacaacggccatgtgcctatccagagcaaggtggtgaatatccctgtgagaagacctgatggctatagaagagacctcatgacagctggagttctctggggactgtttggtgtccttggtttcactggtgttgctttgctgttgtatgccttgttccacaagatatcaggttgtatctaccatttggattctccatattttgctatgacctttccactactgata

SEQ ID NO: 11032 - DNA, 2392 bp, Homo sapiens
tggtgaccaagagtacatctcttttcaaatagctggattaggtcctcatgctgctgtggtcattgctggtcatctttgatgcagtcactgaacaggcagattcgctgacccttgtggcgccctcttctgtcttcgaaggagacagcatcgttctgaaatgccagggagaacagaactggaaaattcagaagatggcttaccataaggataacaaagagttatctgttttcaaaaaattctcagatttccttatccaaagtgcagttttaagtgacagtggtaactatttctgtagtaccaaaggacaactctttctctgggataaaacttcaaatatagtaaagataaaagtccaagagctctttcaacgtcctgtgctgactgccagctccttccagcccatcgaagggggtccagtgagcctgaaatgtgagacccggctctctccacagaggaatccccatctctaatgtaagcttggagatccgggcccccgggggacaggtgactgaaggacaaaaactgatcctgctctgctcagtggctgggggtacaggaaatgtcacattctcctggtacagagaggccacaggaaccagtatgggaaagaaaacccagcgttccctgtcagcagagctggagatcccagctgtgaaagagagtgatgccggcaaatattactgtagagctgacaacggccatgtgcctatccagagcaaggtggtgaatatccctgtgagaattccagtgtctcgccctgtcctcaccctcaggtctcctggggcccaggctgcagtgggggacctgctggagcttcactgtgaggccctgagaggctctcccccaatcttgtaccaattttatcatgaggatgtcacccttgggaacagctcggccccctctggaggaggggcctccttcaacctctctttgactgcagaacattctggaaactactcctgtgaggccaacaacggcctgggggcccagtgcagtgaggcagtgccagtctccatctcaggacctgatggctatagaagagacctcatgacagctggagttctctggggactgtttggtgtccttggtttcactggtgttgctttgctgttgtatgccttgttccacaagatatcaggagaaagttctgccactaatgaacccagaggggcttccaggccaaatcctcaagagttcacctattcaagcccaaccccagacatggaggagctgcagccagtgtatgtcaatgtgggctctgtagatgtggatgtggtttattctcaggtctggagcatgcagcagccagaaagctcagcaaacatcaggacacttctggagaacaaggactcccaagtcatctactcttctgtgaagaaatcataacacttggaggaatcagaagggaagatcaacagcaaggatggggcatcattaagacttgctataaaaccttatgaaaatgcttgaggcttatcacctgccacagccagaacgtgcctcaggaggcacctcctgtcatttttgtcctgatgatgtttcttctccaatatcttcttttacctatcaatattcattgaactgctgctacatccagacactgtgcaaataaattatttctgctaccttctcttaagcaatcagtgtgtaaagatttgagggaagaatgaataagagatacaaggtctcaccttcatctactgtgaagtgatgagaacaggacttgatagtggtgtattaacttatttatgtgctgctggatacagtttgctaatattttgttgagaatttttgcaaatatgttcattgggaatattggcctgaaattttcttttccactgtgtctctgccagaatgtttgtatcaggctgatgctggcttcatagaatgagttaggcaggagcccttcctccttgattttttggcatagtttcagcaggattggtaccagttattctttctgcatcttgtagaattcagctatgaatccatctggtctagggcttttgtgttggttggtaagttttttattactaattcaacttcagcgcttgatattggtctaggaggggtttctgtctcttcctggttcaatcttgggagattgtgtgtttccaggaatttagccgtttcctccagattttcttctttatgtgcatcgacttgagtgtaaacataacttatatgcactgggaaaccaaaaaatctgtgtgacttgctttattgcagcatttgttttattttggtagtctggaactgaacctgcaatatcaccaaagtatgcatatagttgcaaaaatgtgatttttgacatagtaaatatgagtatttgcaataaactatgatattacttttgtaagtatatagaataaaatgtaaataatctataaaa

SEQ ID NO: 11033 - DNA, 420 bp, Homo sapiens
atgctgctgtggtcattgctggtcatctttgatgcagtcactgaacaggcagattcgctgacccttgtggcgccctcttctgtcttcgaaggagacagcatcgttctgaaatgccagggagaacagaactggaaaattcagaagatggcttaccataaggataacaaagagttatctgttttcaaaaaattctcagatttccttatccaaagtgcagttttaagtgacagtggtaactatttctgtagtaccaaaggacaactctttctctgggataaaacttcaaatatagtaaagataaaagtccaagagctctttcaacgtcctgtgctgactgccagctccttccagcccatcgaagggggtccagtgagcctgaaatgtgagacccggctctctccacagaggaatccccatctc

SEQ ID NO: 11034 - DNA, 783 bp, Homo sapiens
atgggaaagaaaacccagcgttccctgtcagcagagctggagatcccagctgtgaaagagagtgatgccggcaaatattactgtagagctgacaacggccatgtgcctatccagagcaaggtggtgaatatccctgtgagaattccagtgtctcgccctgtcctcaccctcaggtctcctggggcccaggctgcagtgggggacctgctggagcttcactgtgaggccctgagaggctctcccccaatcttgtaccaattttatcatgaggatgtcacccttgggaacagctcggccccctctggaggaggggcctccttcaacctctctttgactgcagaacattctggaaactactcctgtgaggccaacaacggcctgggggcccagtgcagtgaggcagtgccagtctccatctcaggacctgatggctatagaagagacctcatgacagctggagttctctggggactgtttggtgtccttggtttcactggtgttgctttgctgttgtatgccttgttccacaagatatcaggagaaagttctgccactaatgaacccagaggggcttccaggccaaatcctcaagagttcacctattcaagcccaaccccagacatggaggagctgcagccagtgtatgtcaatgtgggctctgtagatgtggatgtggtttattctcaggtctggagcatgcagcagccagaaagctcagcaaacatcaggacacttctggagaacaaggactcccaagtcatctactcttctgtgaagaaatca

SEQ ID NO: 11035 - DNA, 2077 bp, Homo sapiens
ccacgcgtccggtcctgaactgggctgaataaacatacctaaatatatgtttagaaatgctcctatgtatcagttttcccaggaacaactataatattatagaaatcttaaaattatttcctaataaaaaattataggatacaaaagaaaaaaaagaaatatgaagagggctggatgggcacaggaaaacaatcagatgagaacaacagatgaccgtgtctgcaggcagcacccagaactgatattcccctcaaacgtctaaatatattgttgagaaaattatctctaactgttctagtgggaatgtgggaatggaaaatatgcaacagccatggggccaggccctttgctgagcctgcaggttgggagtttgtgaatctattgaggcatcacaaatcttttctgatagcccctctgtgtctgtcagttccagtgtctcgccctgtcctcaccctcaggtctcctggggcccaggctgcagtgggggacctgctggagcttcactgtgaggccctgagaggctctcccccaatcttgtaccaattttatcatgaggatgtcacccttgggaacagctcggccccctctggaggaggggcctccttcaacctctctttgactgcagaacattctggaaactactcctgtgaggccaacaacggcctgggggcccagtgcagtgaggcagtgccagtctccatctcaggacctgatggctatagaagagacctcatgacagctggagttctctggggactgtttggtgtccttggtttcactggtgttgctttgctgttgtatgccttgttccacaagatatcaggagaaagttctgccactaatgaacccagaggggcttccaggccaaatcctcaagagttcacctattcaagcccaaccccagacatggaggagctgcagccagtgtatgtcaatgtgggctctgtagatgtggatgtggtttattctcaggtctggagcatgcagcagccagaaagctcagcaaacatcaggacacttctggagaacaaggactcccaagtcatctactcttctgtgaagaaatcataacacttggaggaatcagaagggaagatcaacagcaaggatggggcatcattaagacttgctataaaaccttatgaaaatgcttgaggcttatcacctgccacagccagaacgtgcctcaggaggcacctcctgtcatttttgtcctgatgatgtttcttctccaatatcttcttttacctatcaatattcattgaactgctgctacatccagacactgtgcaaataaattatttctgctaccttctcttaagcaatcagtgtgtaaagatttgagggaagaatgaataagagatacaaggtctcaccttcatctactgtgaagtgatgagaacaggacttgatagtggtgtattaacttatttatgtgctgctggatacagtttgctaatattttgttgagaatttttgcaaatatgttcattgggaatattggcctgaaattttcttttccactgtgtctctgccagaatgtttgtatcaggctgatgctggcttcatagaatgagttaggcaggagcccttcctccttgattttttggcatagtttcagcaggattggtaccagttattctttctgcatcttgtagaattcagctatgaatccatctggtctagggcttttgtgttggttggtaagttttttattactaattcaacttcagcgcttgatattggtctaggaggggtttctgtctcttcctggttcaatcttgggagattgtgtgtttccaggaatttagccgtttcctccagattttcttctttatgtgcatcgacttgagtgtaaacataacttatatgcactgggaaaccaaaaaatctgtgtgacttgctttattgcagcatttgttttattttggtagtctggaactgaacctgcaatatcaccaaagtatgcatatagttgcaaaaatgtgatttttgacatagtaaatatgagtatttgcaataaactatgatattacttttgtaagtatatagaataaaatgtaaataatctataaaa

SEQ ID NO: 11036 - DNA, 765 bp, Homo sapiens
atgtgggaatggaaaatatgcaacagccatggggccaggccctttgctgagcctgcaggttgggagtttgtgaatctattgaggcatcacaaatcttttctgatagcccctctgtgtctgtcagttccagtgtctcgccctgtcctcaccctcaggtctcctggggcccaggctgcagtgggggacctgctggagcttcactgtgaggccctgagaggctctcccccaatcttgtaccaattttatcatgaggatgtcacccttgggaacagctcggccccctctggaggaggggcctccttcaacctctctttgactgcagaacattctggaaactactcctgtgaggccaacaacggcctgggggcccagtgcagtgaggcagtgccagtctccatctcaggacctgatggctatagaagagacctcatgacagctggagttctctggggactgtttggtgtccttggtttcactggtgttgctttgctgttgtatgccttgttccacaagatatcaggagaaagttctgccactaatgaacccagaggggcttccaggccaaatcctcaagagttcacctattcaagcccaaccccagacatggaggagctgcagccagtgtatgtcaatgtgggctctgtagatgtggatgtggtttattctcaggtctggagcatgcagcagccagaaagctcagcaaacatcaggacacttctggagaacaaggactcccaagtcatctactcttctgtgaagaaatca

SEQ ID NO: 11037 - DNA, 1101 bp, Homo sapiens
ccacgcgtccggtcctgaactgggctgaataaacatacctaaatatatgtttagaaatgctcctatgtatcagttttcccaggaacaactataatattatagaaatcttaaaattatttcctaataaaaaattataggatacaaaagaaaaaaaagaaatatgaagagggctggatgggcacaggaaaacaatcagatgagaacaacagatgaccgtgtctgcaggcagcacccagaactgatattcccctcaaacgtctaaatatattgttgagaaaattatctctaactgttctagtgggaatgtgggaatggaaaatatgcaacagccatggggccaggccctttgctgagcctgcaggttgggagtttgtgaatctattgaggcatcacaaatcttttctgatagcccctctgtgtctgtcagttccagtgtctcgccctgtcctcaccctcaggtctcctggggcccaggctgcagtgggggacctgctggagcttcactgtgaggccctgagaggctctcccccaatcttgtaccaattttatcatgaggatgtcacccttgggaacagctcggccccctctggaggaggggcctccttcaacctctctttgactgcagaacattctggaaactactcctgtgaggccaacaacggcctgggggcccagtgcagtgaggcagtgccagtctccatctcaggacctgatggctatagaagagacctcatgacagctggagttctctggggactgtttggtgtccttggtttcactggtgttgctttgctgttgtatgccttgttccacaagatatcaggttgtatctaccatttggattctccatattttgctatgacctttccactactgatatagattgaaattacaaaaaaagaagagagaaaagaaaactctccaaaagccaataatttctttttatgcttcataattctgcaaggctctgtgcaatgctcaatgtggtcatactgctaattatacaatatgtcactgttccctgtgcatagtcactggagattaaattatttacacattctttcaaaaaaaaaaaaaaaaaaaaaaaaaaaaaaaaaaaaa

SEQ ID NO: 11038 - DNA, 576 bp, Homo sapiens
atgtgggaatggaaaatatgcaacagccatggggccaggccctttgctgagcctgcaggttgggagtttgtgaatctattgaggcatcacaaatcttttctgatagcccctctgtgtctgtcagttccagtgtctcgccctgtcctcaccctcaggtctcctggggcccaggctgcagtgggggacctgctggagcttcactgtgaggccctgagaggctctcccccaatcttgtaccaattttatcatgaggatgtcacccttgggaacagctcggccccctctggaggaggggcctccttcaacctctctttgactgcagaacattctggaaactactcctgtgaggccaacaacggcctgggggcccagtgcagtgaggcagtgccagtctccatctcaggacctgatggctatagaagagacctcatgacagctggagttctctggggactgtttggtgtccttggtttcactggtgttgctttgctgttgtatgccttgttccacaagatatcaggttgtatctaccatttggattctccatattttgctatgacctttccactactgata

SEQ ID NO: 11039 - protein, 508 aa, Homo sapiens; identical to SEQ ID NO: 10464

SEQ ID NO: 11040 - protein, 413 aa, Homo sapiens
MLLWSLLVIFDAVTEQADSLTLVAPSSVFEGDSIVLKCQGEQNWKIQKMAYHKDNKELSVFKKFSDFLIQSAVLSDSGNYFCSTKGQLFLWDKTSNIVKIKVQGIPISNVSLEIRAPGGQVTEGQKLILLCSVAGGTGNVTFSWYREATGTSMGKKTQRSLSAELEIPAVKESDAGKYYCRADNGHVPIQSKVVNIPVRIPVSRPVLTLRSPGAQAAVGDLLELHCEALRGSPPILYQFYHEDVTLGNSSAPSGGGASFNLSLTAEHSGNYSCEANNGLGAQCSEAVPVSISGPDGYRRDLMTAGVLWGLFGVLGFTGVALLLYALFHKISGESSATNEPRGASRPNPQEFTYSSPTPDMEELQPVYVNVGSVDVDVVYSQVWSMQQPESSANIRTLLENKDSQVIYSSVKKS

SEQ ID NO: 11041 - protein, 415 aa, Homo sapiens
MLLWSLLVIFDAVTEQADSLTLVAPSSVFEGDSIVLKCQGEQNWKIQKMAYHKDNKELSVFKKFSDFLIQSAVLSDSGNYFCSTKGQLFLWDKTSNIVKIKVQELFQRPVLTASSFQPIEGGPVSLKCETRLSPQRLDVQLQFCFFRENQVLGSGWSSSPELQISAVWSEDTGSYWCKAETVTHRIRKQSLQSQIHVQRIPISNVSLEIRAPGGQVTEGQKLILLCSVAGGTGNVTFSWYREATGTSMGKKTQRSLSAELEIPAVKESDAGKYYCRADNGHVPIQSKVVNIPVRRPDGYRRDLMTAGVLWGLFGVLGFTGVALLLYALFHKISGESSATNEPRGASRPNPQEFTYSSPTPDMEELQPVYVNVGSVDVDVVYSQVWSMQQPESSANIRTLLENKDSQVIYSSVKKS

SEQ ID NO: 11042 - protein, 320 aa, Homo sapiens
MLLWSLLVIFDAVTEQADSLTLVAPSSVFEGDSIVLKCQGEQNWKIQKMAYHKDNKELSVFKKFSDFLIQSAVLSDSGNYFCSTKGQLFLWDKTSNIVKIKVQGIPISNVSLEIRAPGGQVTEGQKLILLCSVAGGTGNVTFSWYREATGTSMGKKTQRSLSAELEIPAVKESDAGKYYCRADNGHVPIQSKVVNIPVRRPDGYRRDLMTAGVLWGLFGVLGFTGVALLLYALFHKISGESSATNEPRGASRPNPQEFTYSSPTPDMEELQPVYVNVGSVDVDVVYSQVWSMQQPESSANIRTLLENKDSQVIYSSVKKS

SEQ ID NO: 11043 - protein, 445 aa, Homo sapiens
MLLWSLLVIFDAVTEQADSLTLVAPSSVFEGDSIVLKCQGEQNWKIQKMAYHKDNKELSVFKKFSDFLIQSAVLSDSGNYFCSTKGQLFLWDKTSNIVKIKVQELFQRPVLTASSFQPIEGGPVSLKCETRLSPQRLDVQLQFCFFRENQVLGSGWSSSPELQISAVWSEDTGSYWCKAETVTHRIRKQSLQSQIHVQRIPISNVSLEIRAPGGQVTEGQKLILLCSVAGGTGNVTFSWYREATGTSMGKKTQRSLSAELEIPAVKESDAGKYYCRADNGHVPIQSKVVNIPVRIPVSRPVLTLRSPGAQAAVGDLLELHCEALRGSPPILYQFYHEDVTLGNSSAPSGGGASFNLSLTAEHSGNYSCEANNGLGAQCSEAVPVSISGPDGYRRDLMTAGVLWGLFGVLGFTGVALLLYALFHKISGCIYHLDSPYFAMTFPLLI

SEQ ID NO: 11044 - protein, 350 aa, Homo sapiens
MLLWSLLVIFDAVTEQADSLTLVAPSSVFEGDSIVLKCQGEQNWKIQKMAYHKDNKELSVFKKFSDFLIQSAVLSDSGNYFCSTKGQLFLWDKTSNIVKIKVQGIPISNVSLEIRAPGGQVTEGQKLILLCSVAGGTGNVTFSWYREATGTSMGKKTQRSLSAELEIPAVKESDAGKYYCRADNGHVPIQSKVVNIPVRIPVSRPVLTLRSPGAQAAVGDLLELHCEALRGSPPILYQFYHEDVTLGNSSAPSGGGASFNLSLTAEHSGNYSCEANNGLGAQCSEAVPVSISGPDGYRRDLMTAGVLWGLFGVLGFTGVALLLYALFHKISGCIYHLDSPYFAMTFPLLI

SEQ ID NO: 11045 - protein, 352 aa, Homo sapiens
MLLWSLLVIFDAVTEQADSLTLVAPSSVFEGDSIVLKCQGEQNWKIQKMAYHKDNKELSVFKKFSDFLIQSAVLSDSGNYFCSTKGQLFLWDKTSNIVKIKVQELFQRPVLTASSFQPIEGGPVSLKCETRLSPQRLDVQLQFCFFRENQVLGSGWSSSPELQISAVWSEDTGSYWCKAETVTHRIRKQSLQSQIHVQRIPISNVSLEIRAPGGQVTEGQKLILLCSVAGGTGNVTFSWYREATGTSMGKKTQRSLSAELEIPAVKESDAGKYYCRADNGHVPIQSKVVNIPVRRPDGYRRDLMTAGVLWGLFGVLGFTGVALLLYALFHKISGCIYHLDSPYFAMTFPLLI

SEQ ID NO: 11046 - protein, 257 aa, Homo sapiens
MLLWSLLVIFDAVTEQADSLTLVAPSSVFEGDSIVLKCQGEQNWKIQKMAYHKDNKELSVFKKFSDFLIQSAVLSDSGNYFCSTKGQLFLWDKTSNIVKIKVQGIPISNVSLEIRAPGGQVTEGQKLILLCSVAGGTGNVTFSWYREATGTSMGKKTQRSLSAELEIPAVKESDAGKYYCRADNGHVPIQSKVVNIPVRRPDGYRRDLMTAGVLWGLFGVLGFTGVALLLYALFHKISGCIYHLDSPYFAMTFPLLI

SEQ ID NO: 11047 - protein, 365 aa, Homo sapiens
MAYHKDNKELSVFKKFSDFLIQSAVLSDSGNYFCSTKGQLFLWDKTSNIVKIKVQGIPISNVSLEIRAPGGQVTEGQKLILLCSVAGGTGNVTFSWYREATGTSMGKKTQRSLSAELEIPAVKESDAGKYYCRADNGHVPIQSKVVNIPVRIPVSRPVLTLRSPGAQAAVGDLLELHCEALRGSPPILYQFYHEDVTLGNSSAPSGGGASFNLSLTAEHSGNYSCEANNGLGAQCSEAVPVSISGPDGYRRDLMTAGVLWGLFGVLGFTGVALLLYALFHKISGESSATNEPRGASRPNPQEFTYSSPTPDMEELQPVYVNVGSVDVDVVYSQVWSMQQPESSANIRTLLENKDSQVIYSSVKKS

SEQ ID NO: 11048 - protein, 460 aa, Homo sapiens
MAYHKDNKELSVFKKFSDFLIQSAVLSDSGNYFCSTKGQLFLWDKTSNIVKIKVQELFQRPVLTASSFQPIEGGPVSLKCETRLSPQRLDVQLQFCFFRENQVLGSGWSSSPELQISAVWSEDTGSYWCKAETVTHRIRKQSLQSQIHVQRIPISNVSLEIRAPGGQVTEGQKLILLCSVAGGTGNVTFSWYREATGTSMGKKTQRSLSAELEIPAVKESDAGKYYCRADNGHVPIQSKVVNIPVRIPVSRPVLTLRSPGAQAAVGDLLELHCEALRGSPPILYQFYHEDVTLGNSSAPSGGGASFNLSLTAEHSGNYSCEANNGLGAQCSEAVPVSISGPDGYRRDLMTAGVLWGLFGVLGFTGVALLLYALFHKISGESSATNEPRGASRPNPQEFTYSSPTPDMEELQPVYVNVGSVDVDVVYSQVWSMQQPESSANIRTLLENKDSQVIYSSVKKS

SEQ ID NO: 11049 - protein, 272 aa, Homo sapiens
MAYHKDNKELSVFKKFSDFLIQSAVLSDSGNYFCSTKGQLFLWDKTSNIVKIKVQGIPISNVSLEIRAPGGQVTEGQKLILLCSVAGGTGNVTFSWYREATGTSMGKKTQRSLSAELEIPAVKESDAGKYYCRADNGHVPIQSKVVNIPVRRPDGYRRDLMTAGVLWGLFGVLGFTGVALLLYALFHKISGESSATNEPRGASRPNPQEFTYSSPTPDMEELQPVYVNVGSVDVDVVYSQVWSMQQPESSANIRTLLENKDSQVIYSSVKKS

SEQ ID NO: 11050 - protein, 367 aa, Homo sapiens
MAYHKDNKELSVFKKFSDFLIQSAVLSDSGNYFCSTKGQLFLWDKTSNIVKIKVQELFQRPVLTASSFQPIEGGPVSLKCETRLSPQRLDVQLQFCFFRENQVLGSGWSSSPELQISAVWSEDTGSYWCKAETVTHRIRKQSLQSQIHVQRIPISNVSLEIRAPGGQVTEGQKLILLCSVAGGTGNVTFSWYREATGTSMGKKTQRSLSAELEIPAVKESDAGKYYCRADNGHVPIQSKVVNIPVRRPDGYRRDLMTAGVLWGLFGVLGFTGVALLLYALFHKISGESSATNEPRGASRPNPQEFTYSSPTPDMEELQPVYVNVGSVDVDVVYSQVWSMQQPESSANIRTLLENKDSQVIYSSVKKS

SEQ ID NO: 11051 - protein, 302 aa, Homo sapiens
MAYHKDNKELSVFKKFSDFLIQSAVLSDSGNYFCSTKGQLFLWDKTSNIVKIKVQGIPISNVSLEIRAPGGQVTEGQKLILLCSVAGGTGNVTFSWYREATGTSMGKKTQRSLSAELEIPAVKESDAGKYYCRADNGHVPIQSKVVNIPVRIPVSRPVLTLRSPGAQAAVGDLLELHCEALRGSPPILYQFYHEDVTLGNSSAPSGGGASFNLSLTAEHSGNYSCEANNGLGAQCSEAVPVSISGPDGYRRDLMTAGVLWGLFGVLGFTGVALLLYALFHKISGCIYHLDSPYFAMTFPLLI

SEQ ID NO: 11052 - protein, 397 aa, Homo sapiens
MAYHKDNKELSVFKKFSDFLIQSAVLSDSGNYFCSTKGQLFLWDKTSNIVKIKVQELFQRPVLTASSFQPIEGGPVSLKCETRLSPQRLDVQLQFCFFRENQVLGSGWSSSPELQISAVWSEDTGSYWCKAETVTHRIRKQSLQSQIHVQRIPISNVSLEIRAPGGQVTEGQKLILLCSVAGGTGNVTFSWYREATGTSMGKKTQRSLSAELEIPAVKESDAGKYYCRADNGHVPIQSKVVNIPVRIPVSRPVLTLRSPGAQAAVGDLLELHCEALRGSPPILYQFYHEDVTLGNSSAPSGGGASFNLSLTAEHSGNYSCEANNGLGAQCSEAVPVSISGPDGYRRDLMTAGVLWGLFGVLGFTGVALLLYALFHKISGCIYHLDSPYFAMTFPLLI

SEQ ID NO: 11053 - protein, 209 aa, Homo sapiens
MAYHKDNKELSVFKKFSDFLIQSAVLSDSGNYFCSTKGQLFLWDKTSNIVKIKVQGIPISNVSLEIRAPGGQVTEGQKLILLCSVAGGTGNVTFSWYREATGTSMGKKTQRSLSAELEIPAVKESDAGKYYCRADNGHVPIQSKVVNIPVRRPDGYRRDLMTAGVLWGLFGVLGFTGVALLLYALFHKISGCIYHLDSPYFAMTFPLLI

SEQ ID NO: 11054 - protein, 304 aa, Homo sapiens
MAYHKDNKELSVFKKFSDFLIQSAVLSDSGNYFCSTKGQLFLWDKTSNIVKIKVQELFQRPVLTASSFQPIEGGPVSLKCETRLSPQRLDVQLQFCFFRENQVLGSGWSSSPELQISAVWSEDTGSYWCKAETVTHRIRKQSLQSQIHVQRIPISNVSLEIRAPGGQVTEGQKLILLCSVAGGTGNVTFSWYREATGTSMGKKTQRSLSAELEIPAVKESDAGKYYCRADNGHVPIQSKVVNIPVRRPDGYRRDLMTAGVLWGLFGVLGFTGVALLLYALFHKISGCIYHLDSPYFAMTFPLLI

SEQ ID NO: 11055 - protein, 140 aa, Homo sapiens
MLLWSLLVIFDAVTEQADSLTLVAPSSVFEGDSIVLKCQGEQNWKIQKMAYHKDNKELSVFKKFSDFLIQSAVLSDSGNYFCSTKGQLFLWDKTSNIVKIKVQELFQRPVLTASSFQPIEGGPVSLKCETRLSPQRNPHL

SEQ ID NO: 11056 - protein, 261 aa, Homo sapiens; identical to SEQ ID NO: 9611

SEQ ID NO: 11057 - protein, 255 aa, Homo sapiens; identical to SEQ ID NO: 9612

SEQ ID NO: 11058 - protein, 192 aa, Homo sapiens
MWEWKICNSHGARPFAEPAGWEFVNLLRHHKSFLIAPLCLSVPVSRPVLTLRSPGAQAAVGDLLELHCEALRGSPPILYQFYHEDVTLGNSSAPSGGGASFNLSLTAEHSGNYSCEANNGLGAQCSEAVPVSISGPDGYRRDLMTAGVLWGLFGVLGFTGVALLLYALFHKISGCIYHLDSPYFAMTFPLLI

SEQ ID NO: 11059 - DNA, 21 bp, Artificial Sequence
  sense PCR primer
ctgctgtggtcattgctggtc

SEQ ID NO: 11060 - DNA, 27 bp, Artificial Sequence
  antisense PCR primer
gacactggaattctcacagggatattc

SEQ ID NO: 11061 - protein, 23 aa, Homo sapiens
SVHPPWTTFFKGERVTLTCNGFQ

SEQ ID NO: 11062 - protein, 23 aa, Homo sapiens
PRSNPVRLLFSSDSLILQAPYSV

SEQ ID NO: 11063 - protein, 29 aa, Homo sapiens
NDVFRSNFKIIKIQELFPHPELKATDSQP

SEQ ID NO: 11064 - protein, 21 aa, Homo sapiens
FFRDGEVILSDWSTYPELQLP

SEQ ID NO: 11065 - protein, 13 aa, Homo sapiens
GAETVRGNIHKHS

SEQ ID NO: 11066 - protein, 11 aa, Homo sapiens
IPVSGVLLETQ

SEQ ID NO: 11067 - protein, 23 aa, Homo sapiens
GDTTFSWHREDMQESLGRKTQRS

SEQ ID NO: 11068 - protein, 19 aa, Homo sapiens
AGATGGLLSALLLAVALLF

SEQ ID NO: 11069 - protein, 19 aa, Homo sapiens
ANTSRTLLEDKDVSVVYSE

SEQ ID NO: 11070 - protein, 16 aa, Homo sapiens
PPWTTFFKGERVTLTC

SEQ ID NO: 11071 - protein, 12 aa, Homo sapiens
RHYWGEKLTLTP

SEQ ID NO: 11072-11080 - skipped (9 entries)

SEQ ID NO: 11081 - protein, 19 aa, Homo sapiens
ILLVLAPVSGQFARTPRPI

SEQ ID NO: 11082 - protein, 28 aa, Homo sapiens
RFYSPQKTKWYHRYLGKEILRETPDNIL

SEQ ID NO: 11083 - protein, 28 aa, Homo sapiens
ILQAPLSVFEGDSVVLRCRAKAEVTLNN

SEQ ID NO: 11084 - protein, 28 aa, Homo sapiens
WCKAATMPHSVISDSPRSWIQVQIPASH

SEQ ID NO: 11085 - protein, 21 aa, Homo sapiens
KVTLHCETQEDSLRTLYRFYH

SEQ ID NO: 11086 - protein, 15 aa, Homo sapiens
SVRCERGASISFSLT

SEQ ID NO: 11087 - protein, 41 aa, Homo sapiens
GLGAKPSKAVSLSVTVPVSHPVLNLSSPEDLIFEGAKVTLH

SEQ ID NO: 11088 - protein, 26 aa, Homo sapiens
DAALERRSANSAGGVAISFSLTAEHS

SEQ ID NO: 11089 - protein, 32 aa, Homo sapiens
KAVSLSITVPVSHPVLTLSSAEALTFEGATVT

SEQ ID NO: 11090 - protein, 20 aa, Homo sapiens
VILLVLAPVSGQFARTPRPI

SEQ ID NO: 11091 - protein, 27 aa, Homo sapiens
PWTTVFQGERVTLTCKGFRFYSPQKTK

SEQ ID NO: 11092 - protein, 22 aa, Homo sapiens
WYHRYLGKEILRETPDNILEVQ

SEQ ID NO: 11093-11098 - skipped (6 entries)

SEQ ID NO: 11099 - protein, 29 aa, Homo sapiens
VILLVLAPVSGQFARTPRPIIFLQPPWTT

SEQ ID NO: 11100 - protein, 37 aa, Homo sapiens
RVTLTCKGFRFYSPQKTKWYHRYLGKEILRETPDNIL

SEQ ID NO: 11101 - protein, 28 aa, Homo sapiens
ILQAPLSVFEGDSVVLRCRAKAEVTLNN

SEQ ID NO: 11102 - protein, 40 aa, Homo sapiens
QITAMWSKDSGFYWCKAATMPHSVISDSPRSWIQVQIPAS

SEQ ID NO: 11103 - protein, 34 aa, Homo sapiens
SPEKALNFEGTKVTLHCETQEDSLRTLYRFYHEG

SEQ ID NO: 11104 - protein, 30 aa, Homo sapiens
RFYHEGVPLRHKSVRCERGASISFSLTTEN

SEQ ID NO: 11105 - protein, 43 aa, Homo sapiens
NGLGAKPSKAVSLSVTVPVSHPVLNLSSPEDLIFEGAKVTLHC

SEQ ID NO: 11106 - protein, 31 aa, Homo sapiens
EDAALERRSANSAGGVAISFSLTAEHSGNYY

SEQ ID NO: 11107 - protein, 33 aa, Homo sapiens
KAVSLSITVPVSHPVLTLSSAEALTFEGATVTL

SEQ ID NO: 11108 - protein, 31 aa, Homo sapiens
VILLVLAPVSGQFARTPRPIIFLQPPWTTVF

SEQ ID NO: 11109 - protein, 29 aa, Homo sapiens
IIFLQPPWTTVFQGERVTLTCKGFRFYSP

SEQ ID NO: 11110 - protein, 38 aa, Homo sapiens
TCKGFRFYSPQKTKWYHRYLGKEILRETPDNILEVQES

SEQ ID NO: 11111-11115 - skipped (5 entries)

SEQ ID NO: 11116 - protein, 31 aa, Homo sapiens; identical to SEQ ID NO: 11108

SEQ ID NO: 11117 - protein, 37 aa, Homo sapiens; identical to SEQ ID NO: 11100

SEQ ID NO: 11118 - protein, 29 aa, Homo sapiens
ILQAPLSVFEGDSVVLRCRAKAEVTLNNT

SEQ ID NO: 11119 - protein, 31 aa, Homo sapiens
WCKAATMPHSVISDSPRSWIQVQIPASHPVL

SEQ ID NO: 11120 - protein, 44 aa, Homo sapiens
KVTLHCETQEDSLRTLYRFYHEGVPLRHKSVRCERGASISFSLT

SEQ ID NO: 11121 - protein, 39 aa, Homo sapiens
GAKPSKAVSLSVTVPVSHPVLNLSSPEDLIFEGAKVTLH

SEQ ID NO: 11122 - protein, 28 aa, Homo sapiens
EDAALERRSANSAGGVAISFSLTAEHSG

SEQ ID NO: 11123 - protein, 32 aa, Homo sapiens; identical to SEQ ID NO: 11089

SEQ ID NO: 11124 - protein, 30 aa, Homo sapiens
VILLVLAPVSGQFARTPRPIIFLQPPWTTV

SEQ ID NO: 11125 - protein, 41 aa, Homo sapiens
ERVTLTCKGFRFYSPQKTKWYHRYLGKEILRETPDNILEVQ

SEQ ID NO: 11126-11130 - skipped (5 entries)

SEQ ID NO: 11131 - protein, 29 aa, Homo sapiens
LLLLILTPGREQSGVAPKAVLLLNPPWST

SEQ ID NO: 11132 - protein, 29 aa, Homo sapiens
VALICSSISHSLAQGDTYWYHDEKLLKIK

SEQ ID NO: 11133 - protein, 24 aa, Homo sapiens
HQKVYYKDGKQLPNSYNLEKITVN

SEQ ID NO: 11134 - protein, 27 aa, Homo sapiens
EVTSKPLNIQVQELFLHPVLRASSSTP

SEQ ID NO: 11135 - protein, 33 aa, Homo sapiens
GTVTFSWHKEGRVRSLGRKTQRSLLAELHVLTV

SEQ ID NO: 11136 - protein, 41 aa, Homo sapiens
NVHSPILSTWIRVTVRIPVSHPVLTFRAPRAHTVVGDLLEL

SEQ ID NO: 11137 - protein, 31 aa, Homo sapiens
VSLRVTVPVSRPVLTLRAPGAQAVVGDLLEL

SEQ ID NO: 11138 - protein, 30 aa, Homo sapiens
LTTEHSGNYSCEADNGLGAQHSKVVTLNVT

SEQ ID NO: 11139 - protein, 25 aa, Homo sapiens
GITGLVLSILVLAAAAALLHYARAR

SEQ ID NO: 11140 - protein, 39 aa, Homo sapiens
LLLILTPGREQSGVAPKAVLLLNPPWSTAFKGEKVALIC

SEQ ID NO: 11141 - protein, 31 aa, Homo sapiens
KVALICSSISHSLAQGDTYWYHDEKLLKIKH

SEQ ID NO: 11142-11147 - skipped (6 entries)

SEQ ID NO: 11148 - protein, 24 aa, Homo sapiens
IFDAVTEQADSLTLVAPSSVFEGD

SEQ ID NO: 11149 - protein, 28 aa, Homo sapiens
QKMAYHKDNKELSVFKKFSDFLIQSAVL

SEQ ID NO: 11150 - protein, 27 aa, Homo sapiens
TSNIVKIKVQELFQRPVLTASSFQPIE

SEQ ID NO: 11151 - protein, 34 aa, Homo sapiens
SGWSSSPELQISAVWSEDTGSYWCKAETVTHRIR

SEQ ID NO: 11152 - protein, 31 aa, Homo sapiens
YREATGTSMGKKTQRSLSAELEIPAVKESDA

SEQ ID NO: 11153 - protein, 42 aa, Homo sapiens
VLTLRSPGAQAAVGDLLELHCEALRGSPPILYQFYHEDVTLG

SEQ ID NO: 11154 - protein, 41 aa, Homo sapiens
FNLSLTAEHSGNYSCEANNGLGAQCSEAVPVSISGPDGYRR

SEQ ID NO: 11155 - protein, 38 aa, Homo sapiens; identical to SEQ ID NO: 10458

SEQ ID NO: 11156 - protein, 37 aa, Homo sapiens
VALLLYALFHKISGESSATNEPRGASRPNPQEFTYSS

SEQ ID NO: 11157 - protein, 27 aa, Homo sapiens
DVDVVYSQVWSMQQPESSANIRTLLEN

SEQ ID NO: 11158 - protein, 39 aa, Homo sapiens [sequence omitted]

SEQ ID NO: 11159 - protein, 23 aa, Homo sapiens
DAVTEQADSLTLVAPSSVFEGDS

SEQ ID NO: 11160 - protein, 35 aa, Homo sapiens
QKMAYHKDNKELSVFKKFSDFLIQSAVLSDSGNYT

SEQ ID NO: 11161-11165 - skipped (5 entries)

SEQ ID NO: 11166 - protein, 23 aa, Homo sapiens
YWCEAQTMASKVLRSRRSQINVH

SEQ ID NO: 11167 - protein, 35 aa, Homo sapiens
PSPSGLVSITVRIPVSRPILMLRAPRAQAAVEDVL

SEQ ID NO: 11168 - protein, 29 aa, Homo sapiens
ELHCEALRGSPPILYWFYHEDITLGSRSA

SEQ ID NO: 11169 - protein, 38 aa, Homo sapiens
EAVTLNFTVPTGARSNHLTSGVIEGLLSTLGPATVALL

SEQ ID NO: 11170 - protein, 40 aa, Homo sapiens
IGRRSARDPLRSLPSPLPQEFTYLNSPTPGQLQPIYENVN

SEQ ID NO: 11171 - protein, 29 aa, Homo sapiens
EVYSLAYYNQPEQESVAAETLGTHMEDKV

SEQ ID NO: 11172 - protein, 35 aa, Homo sapiens
ETLGTHMEDKVSLDIYSRLRKANITDVDYEDAMHQ

SEQ ID NO: 11173-11177 - skipped (5 entries)

SEQ ID NO: 11178 - DNA, 120 bp, Homo sapiens
accaaaggacaactctttctctgggataaaacttcaaatatagtaaagataaaagtccaaggaatccccatctctaatgtaagcttggagatccgggcccccgggggacaggtgactgaa

SEQ ID NO: 11179 - DNA, 90 bp, Homo sapiens
tttctctgggataaaacttcaaatatagtaaagataaaagtccaaggaatccccatctctaatgtaagcttggagatccgggcccccggg

SEQ ID NO: 11180 - DNA, 120 bp, Homo sapiens
tgtagagctgacaacggccatgtgcctatccagagcaaggtggtgaatatccctgtgagaagacctgatggctatagaagagacctcatgacagctggagttctctggggactgtttggt

SEQ ID NO: 11181 - DNA, 90 bp, Homo sapiens
ggccatgtgcctatccagagcaaggtggtgaatatccctgtgagaagacctgatggctatagaagagacctcatgacagctggagttctc

SEQ ID NO: 11182 - DNA, 114 bp, Homo sapiens
gtccttggtttcactggtgttgctttgctgttgtatgccttgttccacaagatatcaggttgtatctaccatttggattctccatattttgctatgacctttccactactgata

SEQ ID NO: 11183 - DNA, 90 bp, Homo sapiens
ggtgttgctttgctgttgtatgccttgttccacaagatatcaggttgtatctaccatttggattctccatattttgctatgacctttcca

SEQ ID NO: 11184 - DNA, 72 bp, Homo sapiens
cagcccatcgaagggggtccagtgagcctgaaatgtgagacccggctctctccacagaggaatccccatctc

SEQ ID NO: 11185 - DNA, 57 bp, Homo sapiens
ggtccagtgagcctgaaatgtgagacccggctctctccacagaggaatccccatctc

SEQ ID NO: 11186 - protein, 40 aa, Homo sapiens
TKGQLFLWDKTSNIVKIKVQGIPISNVSLEIRAPGGQVTE

SEQ ID NO: 11187 - protein, 30 aa, Homo sapiens
FLWDKTSNIVKIKVQGIPISNVSLEIRAPG

SEQ ID NO: 11188 - protein, 40 aa, Homo sapiens
CRADNGHVPIQSKVVNIPVRRPDGYRRDLMTAGVLWGLFG

SEQ ID NO: 11189 - protein, 30 aa, Homo sapiens
GHVPIQSKVVNIPVRRPDGYRRDLMTAGVL

SEQ ID NO: 11190 - protein, 38 aa, Homo sapiens
VLGFTGVALLLYALFHKISGCIYHLDSPYFAMTFPLLI

SEQ ID NO: 11191 - protein, 30 aa, Homo sapiens
GVALLLYALFHKISGCIYHLDSPYFAMTFP

SEQ ID NO: 11192 - protein, 24 aa, Homo sapiens
QPIEGGPVSLKCETRLSPQRNPHL

SEQ ID NO: 11193 - protein, 19 aa, Homo sapiens
GPVSLKCETRLSPQRNPHL

SEQ ID NO: 11194 - DNA, 19 bp, Artificial Sequence
  forward IRTA1 primer
gtctgctccgtggctgaag

SEQ ID NO: 11195 - DNA, 21 bp, Artificial Sequence
  reverse IRTA1 primer
cagggaacgctgagttttcct

SEQ ID NO: 11196 - DNA, 19 bp, Artificial Sequence
  forward IRTA 2a primer
gtggcatcccagcacactt

SEQ ID NO: 11197 - DNA, 22 bp, Artificial Sequence
  reverse IRTA 2a primer
cctggaaccataccacaaagga

SEQ ID NO: 11198 - DNA, 23 bp, Artificial Sequence
  forward IRTA 2b primer
tccagtttcctcccctaatcaac

SEQ ID NO: 11199 - DNA, 24 bp, Artificial Sequence
  reverse IRTA 2b primer
agtacggaaaaccccagctagtta

SEQ ID NO: 11200 - DNA, 23 bp, Artificial Sequence
  forward primer amplifying portion of exon 11 contained in Ly1448P splice variants a-p and q2
atcccagctgtgaaagagagtga

SEQ ID NO: 11201 - DNA, 20 bp, Artificial Sequence
  reverse primer amplifying portion of exon 11 contained in Ly1448P splice variants a-p and q2
tgctctggataggcacatgg

SEQ ID NO: 11202 - DNA, 24 bp, Artificial Sequence
  forward primer amplifying portion of exon 12 contained in Ly1448P splice variants r and s
atgtgggaatggaaaatatgcaac

SEQ ID NO: 11203 - DNA, 25 bp, Artificial Sequence
  reverse primer amplifying portion of exon 12 contained in Ly1448P splice variants r and s
ggctatcagaaaagatttgtgatgc

SEQ ID NO: 11204 - DNA, 18 bp, Artificial Sequence
  forward IRTA5 primer
cagccaccgtggccttat

SEQ ID NO: 11205 - DNA, 20 bp, Artificial Sequence
  reverse IRTA5 primer
gagtggatccctggctgaac

SEQ ID NO: 11206 - DNA, 429 bp, Homo sapiens
ccacgcgtccggtcctgaactgggctgaataaacatacctaaatatatgtttagaaatgctcctatgtatcagttttcccaggaacaactataatattatagaaatcttaaaattatttcctaataaaaaattataggatacaaaagaaaaaaaagaaatatgaagagggctggatgggcacaggaaaacaatcagatgagaacaacagatgaccgtgtctgcaggcagcacccagaactgatattcccctcaaacgtctaaatatattgttgagaaaattatctctaactgttctagtgggaatgtgggaatggaaaatatgcaacagccatggggccaggccctttgctgagcctgcaggttgggagtttgtgaatctattgaggcatcacaaatcttttctgatagcccctctgtgtctgtcagtt

SEQ ID NO: 11207 - DNA, 171 bp, Homo sapiens
atgtgggaatggaaaatatgcaacagccatggggccaggccctttgctgagcctgcaggttgggagtttgtgaatctattgaggcatcacaaatcttttctgatagcccctctgtgtctgtcagttccagtgtctcgccctgtcctcaccctcaggtctcctggggcccag

SEQ ID NO: 11208 - DNA, 186 bp, Homo sapiens
atgtgggaatggaaaatatgcaacagccatggggccaggccctttgctgagcctgcaggttgggagtttgtgaatctattgaggcatcacaaatcttttctgatagcccctctgtgtctgtcagttccagtgtctcgccctgtcctcaccctcaggtctcctggggcccaggctgcagtgggggac

SEQ ID NO: 11209 - protein, 42 aa, Homo sapiens
MWEWKICNSHGARPFAEPAGWEFVNLLRHHKSFLIAPLCLSV

SEQ ID NO: 11210 - protein, 57 aa, Homo sapiens
MWEWKICNSHGARPFAEPAGWEFVNLLRHHKSFLIAPLCLSVPVSRPVLTLRSPGAQ

SEQ ID NO: 11211 - protein, 62 aa, Homo sapiens
MWEWKICNSHGARPFAEPAGWEFVNLLRHHKSFLIAPLCLSVPVSRPVLTLRSPGAQAAVGD

SEQ ID NO: 11212 - protein, 9 aa, Homo sapiens
FAEPAGWEF

SEQ ID NO: 11213 - protein, 9 aa, Homo sapiens
AGWEFVNLL

SEQ ID NO: 11214 - protein, 9 aa, Homo sapiens
LIAPLCLSV

SEQ ID NO: 11215 - protein, 9 aa, Homo sapiens
LLRHHKSFL

SEQ ID NO: 11216 - protein, 9 aa, Homo sapiens
SVPVSRPVL

SEQ ID NO: 11217 - protein, 9 aa, Homo sapiens
AGWEFVNLL

SEQ ID NO: 11218 - protein, 9 aa, Homo sapiens
SFLIAPLCL

SEQ ID NO: 11219 - protein, 9 aa, Homo sapiens
FVNLLRHHK

SEQ ID NO: 11220 - protein, 9 aa, Homo sapiens
VSRPVLTLR

SEQ ID NO: 11221 - protein, 9 aa, Homo sapiens
LCLSVPVSR

SEQ ID NO: 11222 - protein, 9 aa, Homo sapiens
VSRPVLTLR

SEQ ID NO: 11223 - protein, 9 aa, Homo sapiens
SVPVSRPVL

SEQ ID NO: 11224 - protein, 9 aa, Homo sapiens
AEPAGWEFV

SEQ ID NO: 11225 - protein, 9 aa, Homo sapiens
NLLRHHKSF

SEQ ID NO: 11226 - protein, 9 aa, Homo sapiens
LLRHHKSFL

SEQ ID NO: 11227 - protein, 9 aa, Homo sapiens
SVPVSRPVL

SEQ ID NO: 11228 - protein, 9 aa, Homo sapiens
APLCLSVPV

SEQ ID NO: 11229 - protein, 9 aa, Homo sapiens
AGWEFVNLL

SEQ ID NO: 11230 - protein, 9 aa, Homo sapiens
LRHHKSFLI

SEQ ID NO: 11231 - protein, 9 aa, Homo sapiens
LRSPGAQAA

SEQ ID NO: 11232 - protein, 9 aa, Homo sapiens
SRPVLTLRS

SEQ ID NO: 11233 - protein, 9 aa, Homo sapiens
LRHHKSFLI

SEQ ID NO: 11234 - protein, 9 aa, Homo sapiens
SRPVLTLRS

SEQ ID NO: 11235 - protein, 9 aa, Homo sapiens
LRSPGAQAA

SEQ ID NO: 11236 - protein, 9 aa, Homo sapiens
LLRHHKSFL

SEQ ID NO: 11237 - protein, 9 aa, Homo sapiens
AGWEFVNLL

SEQ ID NO: 11238 - protein, 9 aa, Homo sapiens
ARPFAEPAG

SEQ ID NO: 11239 - protein, 9 aa, Homo sapiens
KICNSHGAR

SEQ ID NO: 11240 - protein, 9 aa, Homo sapiens
KSFLIAPLC

SEQ ID NO: 11241 - protein, 9 aa, Homo sapiens
WEFVNLLRH

SEQ ID NO: 11242 - protein, 9 aa, Homo sapiens
WEWKICNSH

SEQ ID NO: 11243 - protein, 9 aa, Homo sapiens
RPFAEPAGW

SEQ ID NO: 11244 - protein, 9 aa, Homo sapiens
SVPVSRPVL

SEQ ID NO: 11245 - protein, 9 aa, Homo sapiens
FVNLLRHHK

SEQ ID NO: 11246 - protein, 9 aa, Homo sapiens
RPFAEPAGW

SEQ ID NO: 11247 - protein, 9 aa, Homo sapiens
AEPAGWEFV

SEQ ID NO: 11248 - protein, 9 aa, Homo sapiens
AGWEFVNLL

SEQ ID NO: 11249 - protein, 9 aa, Homo sapiens
HKSFLIAPL

SEQ ID NO: 11250 - protein, 9 aa, Homo sapiens
APLCLSVPV

SEQ ID NO: 11251 - protein, 9 aa, Homo sapiens
AGWEFVNLL

SEQ ID NO: 11252 - protein, 9 aa, Homo sapiens
VPVSRPVLT

SEQ ID NO: 11253 - protein, 9 aa, Homo sapiens
EPAGWEFVN

SEQ ID NO: 11254 - protein, 9 aa, Homo sapiens
APLCLSVPV

SEQ ID NO: 11255 - protein, 9 aa, Homo sapiens
AGWEFVNLL

SEQ ID NO: 11256 - protein, 9 aa, Homo sapiens
VPVSRPVLT

SEQ ID NO: 11257 - protein, 9 aa, Homo sapiens
RPFAEPAGW

SEQ ID NO: 11258 - protein, 9 aa, Homo sapiens
APLCLSVPV

SEQ ID NO: 11259 - protein, 9 aa, Homo sapiens
APLCLSVPV

SEQ ID NO: 11260 - protein, 9 aa, Homo sapiens
AEPAGWEFV

SEQ ID NO: 11261 - protein, 9 aa, Homo sapiens
FAEPAGWEF

SEQ ID NO: 11262 - protein, 9 aa, Homo sapiens
RPFAEPAGW

SEQ ID NO: 11263 - protein, 9 aa, Homo sapiens
SFLIAPLCL

SEQ ID NO: 11264 - protein, 9 aa, Homo sapiens
SFLIAPLCL

SEQ ID NO: 11265 - protein, 9 aa, Homo sapiens
APLCLSVPV

SEQ ID NO: 11266 - protein, 9 aa, Homo sapiens
AGWEFVNLL

SEQ ID NO: 11267 - protein, 9 aa, Homo sapiens
HKSFLIAPL

SEQ ID NO: 11268 - protein, 9 aa, Homo sapiens
WKICNSHGA

SEQ ID NO: 11269 - protein, 9 aa, Homo sapiens
SVPVSRPVL

SEQ ID NO: 11270 - protein, 9 aa, Homo sapiens
AGWEFVNLL

SEQ ID NO: 11271 - protein, 9 aa, Homo sapiens
SFLIAPLCL

SEQ ID NO: 11272 - protein, 9 aa, Homo sapiens
AGWEFVNLL

SEQ ID NO: 11273 - protein, 9 aa, Homo sapiens
LLRHHKSFL

SEQ ID NO: 11274 - protein, 9 aa, Homo sapiens
SVPVSRPVL

SEQ ID NO: 11275 - protein, 9 aa, Homo sapiens
APLCLSVPV

SEQ ID NO: 11276 - protein, 9 aa, Homo sapiens
LSVPVSRPV

SEQ ID NO: 11277 - protein, 9 aa, Homo sapiens
LIAPLCLSV

SEQ ID NO: 11278 - protein, 9 aa, Homo sapiens
RSPGAQAAV

SEQ ID NO: 11279 - protein, 9 aa, Homo sapiens
AEPAGWEFV

SEQ ID NO: 11280 - protein, 9 aa, Homo sapiens
APLCLSVPV

SEQ ID NO: 11281 - protein, 9 aa, Homo sapiens
RPFAEPAGW

SEQ ID NO: 11282 - protein, 9 aa, Homo sapiens
VPVSRPVLT

SEQ ID NO: 11283 - protein, 9 aa, Homo sapiens
EPAGWEFVN

SEQ ID NO: 11284 - protein, 9 aa, Homo sapiens
RSPGAQAAV

SEQ ID NO: 11285 - protein, 9 aa, Homo sapiens
CNSHGARPF

SEQ ID NO: 11286 - protein, 9 aa, Homo sapiens
NLLRHHKSF

SEQ ID NO: 11287 - protein, 9 aa, Homo sapiens
LSVPVSRPV

SEQ ID NO: 11288 - DNA, 20 bp, Artificial Sequence
  forward CD20 primer
ttgggtctggagcacgttct

SEQ ID NO: 11289 - DNA, 23 bp, Artificial Sequence
  reverse CD20 primer
tgccttcttccaggaacttgtaa

SEQ ID NO: 11290 - protein, 8 aa, Artificial Sequence
  C-terminal FLAG epitope tag
DYKDDDDK

SEQ ID NO: 11291 - DNA, 1060 bp, Homo Sapiens
  SPAP1c
tcctgaactgggctgaataaacatacctaaatatatgtttagaaatgctcctatgtatcagttttcccaggaacaactataatattatagaaatcttaaaattatttcctaataaaaaattataggatacaaaagaaaaaaaagaaatatgaagagggctggatgggcacaggaaaacaatcagatgagaacaacagatgaccgtgtctgcaggcagcacccagaactgatattcccctcaaacgtctaaatatattgttgagaaaattatctctaactgttctagtgggaatgtgggaatggaaaatatgcaacagccatggggccaggccctttgctgagcctgcaggttgggagtttgtgaatctattgaggcatcacaaatcttttctgatagcccctctgtgtctgtcagttccagtgtctcgccctgtcctcaccctcaggtctcctggggcccaggctgcagtgggggacctgctggagcttcactgtgaggccctgagaggctctcccccaatcttgtaccaattttatcatgaggatgtcacccttgggaacagctcggccccctctggaggaggggcctccttcaacctctctttgactgcagaacattctggaaactactcctgtgaggccaacaacggcctgggggcccagtgcagtgaggcagtgccagtctccatctcaggtgggtgggtgttacctggatacagagtttgatgtcaatggctgtgtctcaccagcctggagatgtctgctgtgtgtgaagagggggaaggtgatctcagtgtccagtggcttctcttctccccacactaacctgaagagtacagactacacttcaatgatctcttacttgaatttgtatttaacatccctatatagcatttataagaagggcccaagtcttaaacctctggggctgaagcactgctttctttcctcaggacctgatggctatagaagagacctcatgacagctggagttctctggggactgtttggtgtccttggtttcactggtgttgctttgctgtaaaaaaaaaaaaaaaaa

SEQ ID NO: 11292 - DNA, 432 bp, Homo sapiens
  SPAP1c ORF
atgtgggaatggaaaatatgcaacagccatggggccaggccctttgctgagcctgcaggttgggagtttgtgaatctattgaggcatcacaaatcttttctgatagcccctctgtgtctgtcagttccagtgtctcgccctgtcctcaccctcaggtctcctggggcccaggctgcagtgggggacctgctggagcttcactgtgaggccctgagaggctctcccccaatcttgtaccaattttatcatgaggatgtcacccttgggaacagctcggccccctctggaggaggggcctccttcaacctctctttgactgcagaacattctggaaactactcctgtgaggccaacaacggcctgggggcccagtgcagtgaggcagtgccagtctccatctcaggtgggtgggtgttacctggatacagagtt

SEQ ID NO: 11293 - protein, 144 aa, Homo sapiens
  SPAP1c Peptide
MWEWKICNSHGARPFAEPAGWEFVNLLRHHKSFLIAPLCLSVPVSRPVLTLRSPGAQAAVGDLLELHCEALRGSPPILYQFYHEDVTLGNSSAPSGGGASFNLSLTAEHSGNYSCEANNGLGAQCSEAVPVSISGGWVLPGYRV

SEQ ID NO: 11294 - DNA, 35 bp, Artificial Sequence
  HinDIII primer
gtaagcttaccatgtgggaatggaaaatatgcaac

SEQ ID NO: 11295 - DNA, 39 bp, Artificial Sequence
  NotI primer
ggtagcggccgctgatttcttcacagaagagtagatgac
